(19) United States
(12) Patent Application Publication
(10) Pub. No.: US 2024/0417754 A1
(43) Pub. Date: Dec. 19, 2024

(54) SERINE RECOMBINASES

(71) Applicants: The Regents of the University of California, Oakland, CA (US); The Board of Trustees of the Leland Stanford Junior University, Stanford, CA (US); Salk Institute for Biological Studies, La Jolla, CA (US)

(72) Inventors: Ami S. Bhatt, Stanford, CA (US); Matthew G. Durrant, Oakland, CA (US); Joshua C. Tycko, Stanford, CA (US); Patrick D. Hsu, Oakland, CA (US); Alison Fanton, Oakland, CA (US); Michael C. Bassik, Stanford, CA (US); Lacramioara Bintu, Stanford, CA (US)

(21) Appl. No.: 18/706,301

(22) PCT Filed: Nov. 3, 2022
(86) PCT No.: PCT/US22/79227

§ 371 Date: Apr. 30, 2024

Related U.S. Application Data
(60) Provisional application No. 63/400,868, filed on Aug. 25, 2022.
(60) Provisional application No. 63/322,712, filed on Mar. 23, 2022.
(60) Provisional application No. 63/275,288, filed on Nov. 3, 2021.

(51) Int. Cl. C12N 15/90; C12N 9/22

(52) U.S. Cl. CPC C12N 15/90; C12N 9/22; C12Y 301/22

(57) ABSTRACT

Provided herein are recombinases and compositions, methods of identification and methods of using thereof.

### CROSS-REFERENCE TO RELATED APPLICATIONS

[0001] This application claims the benefit of U.S. Provisional Application Nos. 63/275,288, filed Nov. 3, 2021, 63/322,712, filed Mar. 23, 2022, and 63/400,868, filed Aug. 25, 2022, the contents of which are herein incorporated by reference in their entirety.

### STATEMENT REGARDING FEDERALLY SPONSORED RESEARCH

[0002] This invention was made with government support under Grant Numbers OD021369 and AI148623 awarded by the National Institutes of Health. The government has certain rights in the invention.

### SEQUENCE LISTING STATEMENT

[0003] The contents of the electronic sequence listing titled 39817_601_SequenceListing.xml (Size: 3,888,144 bytes; and Date of Creation: Nov. 3, 2022) is herein incorporated by reference in its entirety.

### FIELD

[0004] The present invention relates to serine recombinases and methods of identification and use thereof.

### BACKGROUND

[0005] Despite recent advances in genome engineering, there remains a need for an efficient method to stably integrate multi-kilobase DNA cargos in human and other eukaryotic cells. Large serine recombinases (LSRs), such as BxB1 and ΦC31, have evolved to perform this task in microbial cells, but the previously characterized LSRs have several limitations not suited for use in genome engineering of eukaryotic cells. Directed evolution and protein engineering efforts have not yet successfully transformed these limited candidates into ideal molecular tools. New recombinases and methods of identifying the new recombinases are needed to expand the available tools for genetic engineering.

### SUMMARY

[0006] Provided herein are systems for DNA modification. In select embodiments, the system is a cell free system.

[0007] In some embodiments, the systems comprise a polypeptide comprising a recombinase having an amino acid sequence having at least 70% identity to any of SEQ ID NOs: 1-74, active fragments thereof, or a nucleic acid encoding thereof. In some embodiments, the recombinase has an amino acid sequence having at least 70% identity to any of SEQ ID NOs: 2, 6, 10, 12, 18, 19, 26, 29, 61, 65, or 66. In certain embodiments, the recombinase has an amino acid sequence of SEQ ID NOs: 2, 6, 10, 12, 18, 19, 26, 29, 61, 65, or 66.

[0008] In some embodiments, the systems a polypeptide comprising a recombinase having an amino acid sequence with at least 70% identity to one or more of the following:
[0009] 1) X₁ₐX₂ₐX₃ₐX₄ₐX₅ₐX₆ₐX₇ₐX₈ₐX₉ₐX₁₀ₐX₁₁ₐX₁₂ₐX₁₃ₐX₁₄ₐX₁₅ₐX₁₆ₐX₁₇ₐX₁₈ₐX₁₉ₐX₂₀ₐX₂₁ₐX₂₂ₐX₂₃ₐX₂₄ₐX₂₅ₐX₂₆ₐX₂₇ₐX₂₈ₐX₂₉ₐX₃₀ₐX₃₁ₐX₃₂ₐX₃₃ₐX₃₄ₐ, wherein:
   [0010] X₁ₐ is A, E, I, L, S, T, V, or Y;
   [0011] X₂ₐ is A, D, E, G, K, Q, R, S, or T;
   [0012] X₆ₐ is E or G;
   [0013] X₈ₐ is A, C, F, L, M, or V;
   [0014] X₁₀ₐ is A, F, I, L, M, T, or V;
   [0015] X₁₃ₐ is F, H, I, L, M, N, or V;
   [0016] X₁₄ₐ is A, G, S, or V;
   [0017] X₁₅ₐ is A, D, I, L, S, T, or V;
   [0018] X₁₇ₐ is A, G, or S;
   [0019] X₂₁ₐ is K, R, S, or V;
   [0020] X₂₂ₐ is A, D, E, G, K, N, S, or T;
   [0021] X₂₃ₐ is A, E, I, K, M, N, Q, S, or T;
   [0022] X₂₄ₐ is F, I, L, M, S, or T;
   [0023] X₂₆ₐ is D, E, L, Q, S, or V;
   [0024] X₂₇ₐ is E, N, Q, or R;
   [0025] X₃₂ₐ is A, F, H, I, K, L, M, N, Q, R, S, or V
   [0026] X₃₄ₐ is A, E, G, H, K, L, M, N, Q, R, S, or V; and
   [0027] X₃ₐ, X₄ₐ, X₅ₐ, X₇ₐ, X₉ₐ, X₁₁ₐ, X₁₂ₐ, X₁₆ₐ, X₁₈ₐ, X₁₉ₐ, X₂₀ₐ, X₂₅ₐ, X₂₈ₐ, X₂₉ₐ, X₃₀ₐ, X₃₁ₐ, and X₃₃ₐ are each individually selected from any amino acid;
[0028] 2) X_{1b}X_{2b}X_{3b}X_{4b}X_{5b}X_{6b}X_{7b}X_{8b}X_{9b}X_{10b}X_{11b}X_{12b}X_{13b}X_{14b}X_{15b}X_{16b}X_{17b}X_{18b}, wherein
   [0029] X_{1b} is A, G, or I;
   [0030] X_{2b} is D, E, G, N, P, S, T, or V;
   [0031] X_{3b} is D, G, N, Q, or S;
   [0032] X_{4b} is A, H, N, Q, R, T, V, or Y;
   [0033] X_{6b} is A, D, E, H, I, L, P, Q, R, T, or Y;
   [0034] X_{7b} is A, D, E, Q, or R;
   [0035] X_{8b} is F, I, K, or L;
   [0036] X_{10b} is D, E, F, G, N, Q, R, S, T, or V;
   [0037] X_{11b} is A, I, L, S, T, or V;
   [0038] X_{12b} is D, E, I, K, L, N, Q, R, S, T, or V;
   [0039] X_{13b} is A, D, E, K, M, N, R, S, T, or V;
   [0040] X_{14b} is A, G, Q, R, S, or T;
   [0041] X_{16b} is A, D, E, K, L, Q, R, or T; and
   [0042] X_{18b} is A, L, M, or V; and
   [0043] X_{5b}, X_{9b}, X_{15b}, and X_{17b} are each individually selected from any amino acid;
[0044] 3) X_{1c}X_{2c}X_{3c}X_{4c}X_{5c}X_{6c}X_{7c}X_{8c}X_{9c}X_{10c}X_{11c}X_{12c}X_{13c}ESX_{16c}X_{17c}KX_{19c}X_{20c}X_{21c}X_{22c}X_{23c}X_{24c}X_{25c}X_{26c}, wherein
   [0045] X_{1c} is A, D, F, I, L, M, N, S, or Y;
   [0046] X_{4c} is A, I, K, M, S, or V;
   [0047] X_{6c} is A, F, G, I, L, M, or V;
   [0048] X_{10c} is Q, R, or T;
   [0049] X_{11c} is A, G, or S;
   [0050] X_{13c} is D, E, G, N, Q, or S;
   [0051] X_{17c} is A, H, K, N, R, S, T, or V;
   [0052] X_{21c} is L, M, R, or Y;
   [0053] X_{22c} is A, I, N, Q, S, T, or V;
   [0054] X_{23c} is A, E, F, I, K, L, N, R, T, or V;
   [0055] X_{25c} is A, F, H, L, N, Q, S, T, or Y;
   [0056] X_{26c} is A, I, L, M, N, R, S, T, V, or Y; and
   [0057] X_{2c}, X_{3c}, X_{5c}, X_{7c}, X_{8c}, X_{9c}, X_{12c}, X_{16c}, X_{19c}, X_{20c}, and X_{24c} are each individually selected from any amino acid;
[0058] 4) X_{1d}X_{2d}X_{3d}X_{4d}X_{5d}X_{6d}X_{7d}X_{8d}X_{9d}X_{10d}X_{11d}X_{12d}X_{13d}X_{14d}X_{15d}X_{16d}X_{17d}X_{18d}X_{19d}X_{20d}X_{21d}X_{22d}X_{23d}X_{24d}X_{25d}X_{26d}X_{27d}X_{28d}, wherein:
   [0059] X_{1d} is E, K, N, T, G, S, L, D, V, A, R, or P;
   [0060] X_{2d} is E, H, I, T, G, S, L, D, V, A, or P;
   [0061] X_{4d} is M, I, T, S, L, V, A, R or P;
   [0062] X_{5d} is E, K, N, I, T, G, S, D, Q, V, A, R, or P;
   [0063] X_{6d} is E, G, S, D, A, R, or P;
   [0064] X_{7d} is I, L, D, A, or R;
   [0065] X_{8d} is M, H, K, T, L, V, Q, D, A, or R;
   [0066] X_{9d} is E, K, I, T, G, S, L, D, Q, V, or A;
   [0067] X_{10d} is E, K, H, D, Q, V, A, or R;
   [0068] X_{11d} is M, H, I, S, L, V, Q, A, or R;
   [0069] X_{12d} is Q, E, K, N, M, S, L, D, V, A, or R;
   [0070] X_{13d} is E, K, H, G, S, L, D, Q, A, or R;
   [0071] X_{14d} is E, Y, K, N, I, H, L, V, or A;
   [0072] X_{16d} is E, K, I, T, G, S, L, D, Q, A, or R;
   [0073] X_{17d} is E, K, H, T, G, D, Q, A, or R;
   [0074] X_{19d} is Q, E, K, N, T, G, S, D, V, A, or R;
   [0075] X_{20d} is Q, E, K, N, T, G, S, V, D, A, or R;
   [0076] X_{21d} is I, S, W, L, V, F, A, or R;
   [0077] X_{22d} is Q, E, M, T, G, S, L, V, D, or A;
   [0078] X_{23d} is E, K, N, I, T, G, S, D, A, R, or P;
   [0079] X_{24d} is E, M, I, L, D, Q, or A;
   [0080] X_{25d} is E, Y, I, L, V, F, A, or R;
   [0081] X_{26d} is E, M, T, G, S, L, D, V, A, or R;
   [0082] X_{27d} is E, K, N, G, S, L, D, Q, A, or R;
   [0083] X_{28d} is Q, E, G, V, D, A, R, or P; and
   [0084] X_{3d}, X_{15d}, and X_{18d} are each individually selected from any amino acid;
[0085] 5) X₁ₑX₂ₑX₃ₑX₄ₑX₅ₑX₆ₑX₇ₑX₈ₑX₉ₑX₁₀ₑX₁₁ₑX₁₂ₑX₁₃ₑX₁₄ₑX₁₅ₑX₁₆ₑX₁₇ₑX₁₈ₑ, wherein:
   [0086] X₁ₑ is A, D, E, H, K, N, Q, R, or S;
   [0087] X₂ₑ is A, D, E, F, G, H, K, M, N, Q, R, S, W, or Y;
   [0088] X₃ₑ is E, F, or Y;
   [0089] X₄ₑ is F, H, L, W, or Y;
   [0090] X₆ₑ is A, D, E, F, I, K, L, M, N, Q, R, S, T, or Y;
   [0091] X₇ₑ is F, I, Q, S, T, or V;
   [0092] X₈ₑ is A, G, K, L, N, R, S, T, or V;
   [0093] X₉ₑ is A, D, E, H, K, N, Q, R, T, or Y;
   [0094] X₁₀ₑ is I, N, Q, or R;
   [0095] X₁₁ₑ is F, I, L, M, Q, or S;
   [0096] X₁₄ₑ is A, G, K, N, or S;
   [0097] X₁₅ₑ is K, M, Q, R, S, T, or V;
   [0098] X₁₈ₑ is A, E, G, K, M, N, S, T, or Y; and
   [0099] X₅ₑ, X₁₂ₑ, X₁₃ₑ, X₁₆ₑ, and X₁₇ₑ are each individually selected from any amino acid;
[0100] 6) WX_{2f}X_{3f}X_{4f}X_{5f}X_{6f}X_{7f}X_{8f}X_{9f}X_{10f}X_{11f}X_{12f}X_{13f}X_{14f}X_{15f}X_{16f}GX_{18f}X_{19f}X_{20f}X_{21f}X_{22f}X_{23f}, wherein:
   [0101] X_{2f} is A, E, H, N, R, S, T, or V;
   [0102] X_{4f} is A, G, N, S, or T;
   [0103] X_{5f} is F, G, L, M, N, Q, S, T, or V;
   [0104] X_{6f} is I, L, P, or V;
   [0105] X_{9f} is I, L, T, or V;
   [0106] X_{14f} is A, C, G, M, Q, R, S, or T;
   [0107] X_{16f} is I, L, V, or Y;
   [0108] X_{18f} is D, E, H, N, Q, or S;
   [0109] X_{20f} is E, H, I, L, M, Q, R. or T;
   [0110] X_{21f} is A, E, F, H, L, N, P, or Y;
   [0111] X_{22f} is C, F, H, K, M, N, Q, R, T, or Y;
   [0112] X_{23f} is D, E, F, I, K, L, N, Q, R, S, T, or V; and
   [0113] X_{3f}, X_{7f}, X_{8f} X_{10f}, X_{11f}, X_{12f}, X_{13f}, X_{15f}, and X_{19f} are each individually selected from any amino acid;
[0114] 7) X_{1g}X_{2g}X_{3g}X_{4g}X_{5g}EX_{7g}X_{8g}X_{9g}X_{10g}X_{11g}X_{12g}RX_{14g}X_{15g}X_{16g}X_{17g}X_{18g}X_{19g}X_{20g}X_{21g}, wherein:
   [0115] X_{1g} is A, G, I, N, S, T, or V;
   [0116] X_{3g} is A, I, or S;
   [0117] X_{5g} is F, I, L, M, or Y;
   [0118] X_{7g} is I or R;
   [0119] X_{10g} is D, I, L, or T;
   [0120] X_{12g} is A, E, I, K, M, Q, or S;
   [0121] X_{14g} is I, T, or V;
   [0122] X_{16g} is A, D, G, R, S, or T;
   [0123] X_{18g} is F, K, L, M, or Y;
   [0124] X_{19g} is A, E, H, I, K, L, M, N, Q, R, V, W, or Y;
   [0125] X_{21g} is A, I, K, L, M, or R; and
   [0126] X_{2g}, X_{4g}, X_{8g}, X_{9g}, X_{11g}, X_{15g}, X_{17g}, and X_{20g} are each individually selected from any amino acid;
[0127] 8) X₁ₕX₂ₕX₃ₕX₄ₕX₅ₕX₆ₕX₇ₕX₈ₕX₉ₕX₁₀ₕX₁₁ₕ, wherein:
   [0128] X₁ₕ is F or Y;
   [0129] X₂ₕ is D, E, K, Q, or S;
   [0130] X₃ₕ is E, K, L, M, or Q;
   [0131] X₄ₕ is K, L, or R;
   [0132] X₅ₕ is K, L, or V;
   [0133] X₇ₕ is G or N;
   [0134] X₈ₕ is D, E, H, K, L, M, or R;
   [0135] X₉ₕ is S or T;
   [0136] X₁₁ₕ is F, H, I, Q, S, T, V, or W; and
   [0137] X₆ₕ and X₁₀ₕ are each individually selected from any amino acid;
[0138] 9) X₁ᵢX₂ᵢX₃ᵢX₄ᵢX₅ᵢX₆ᵢX₇ᵢX₈ᵢX₉ᵢX₁₀ᵢX₁₁ᵢX₁₃ᵢX₁₄ᵢX₁₅ᵢX₁₆ᵢX₁₇ᵢX₁₈ᵢX₁₉ᵢX₂₀ᵢX₂₁ᵢX₂₂ᵢX₂₃ᵢX₂₄ᵢX₂₅ᵢX₂₆ᵢX₂₇ᵢ, wherein:
   [0139] X₁ᵢ is I, L, or V;
   [0140] X₄ᵢ is A, D, F, H, I, L, M, N, Q, S, V, or Y;
   [0141] X₈ᵢ is A, G, or S;
   [0142] X₁₀ᵢ is D, E, I, K, N, Q, R, or S;
   [0143] X₁₁ᵢ is E or Q;
   [0144] X₁₅ᵢ is A or K;
   [0145] X₁₆ᵢ is A, Q, R, or S;
   [0146] X₁₈ᵢ is L, M, or R;
   [0147] X₁₉ᵢ is I, L, Q, R, S, or V;
   [0148] X₂₁ᵢ is A, D, E, G, H, I, Q. R, or S;
   [0149] X₂₂ᵢ is A, K, N, Q, S, T, or V;
   [0150] X₂₃ᵢ is A, H, K, R, W, or Y;
   [0151] X₂₅ᵢ is A, G, H, I, K, Q, R, S, or T;
   [0152] X₂₇ᵢ is C, H, I, K, L, R, or V; and
   [0153] X₂ᵢ, X₃ᵢ, X₅ᵢ, X₆ᵢ, X₇ᵢ, X₉ᵢ, X₁₃ᵢ, X₁₄ᵢ, X₁₇ᵢ, X₂₀ᵢ, X₂₄ᵢ, and X₂₆ᵢ are each individually selected from any amino acid;
[0154] 10) RX₂ⱼX₃ⱼX₄ⱼW, wherein:
   [0155] X₂ⱼ is L, M, Q, or R;
   [0156] X₃ⱼ is A, N, or S; and
   [0157] X₄ⱼ is N, P, S, or T;
[0158] 11) X₁ₖX₂ₖX₃ₖX₄ₖX₅ₖX₆ₖX₇ₖX₈ₖF, wherein:
   [0159] X₁ₖ is I, L, or V;
   [0160] X₂ₖ is A or V;
   [0161] X₄ₖ is A, F, H, I, L, Q, W, or Y;
   [0162] X₅ₖ is I, M, or V;
   [0163] X₇ₖ is E, L, Q, or T;
   [0164] X₈ₖ is A, I, or V; and
   [0165] X₃ₖ and X₆ₖ are each individually selected from any amino acid;
[0166] 12) RX₂ₗX₃ₗX₄ₗX₅ₗX₆ₗX₇ₗX₈ₗX₉ₗX₁₀ₗX₁₁ₗX₁₂ₗX₁₃ₗ, wherein:
   [0167] X₂ₗ is D, K, N, R, S, or V;
   [0168] X₃ₗ is A, D, E, F, G, K, P, Q, or S;
   [0169] X₄ₗ is A, E, I, K, L, S, T, or V;
   [0170] X₅ₗ is any amino acid;
   [0171] X₆ₗ is F, G, I, L, N, or V;
   [0172] X₇ₗ is A, F, I, L, Q, R, V, or Y;
   [0173] X₈ₗ is D, E, I, L, M, N, Q, S, T, or V;
   [0174] X₉ₗ is D, E, F, I, L, M, Q, T, V, or Y;
   [0175] X₁₀ₗ is I, K, L, R, or V;
   [0176] X₁₁ₗ is D, E, K, N, Q, or R;
   [0177] X₁₂ₗ is D, E, F, K, L, N, Q, W, or Y; and
   [0178] X₁₃ₗ is F or L; and
[0179] 13) X₁ₘX₂ₘX₃ₘX₄ₘX₅ₘX₆ₘX₇ₘX₈ₘX₉ₘX₁₀ₘX₁₁ₘX₁₂ₘX₁₃ₘX₁₄ₘX₁₅ₘX₁₆ₘX₁₇ₘX₁₈ₘX₁₉ₘX₂₀ₘX₂₁ₘX₂₂ₘX₂₃ₘX₂₄ₘ, wherein:
   [0180] X₁ₘ is A, E, F, I, L, M, N, Q, S, T, V, or Y;
   [0181] X₂ₘ is A, F, G, I, L, M, R, S, T, or V;
   [0182] X₆ₘ is A, D, E, F, G, H, L, M, N, S, or T;
   [0183] X₉ₘ is D, M, N, or S;
   [0184] X₁₀ₘ is D, E, or Q;
   [0185] X₁₂ₘ is C, F, H, L, T, V, or Y;
   [0186] X₁₄ₘ is A, E, K, L, R, or Y;
   [0187] X₁₇ₘ is A, L, or S;
   [0188] X₁₉ₘ is D, E, K, N, Q, R, or S;
   [0189] X₂₀ₘ is G, I, M, Q, R, T, or V;
   [0190] X₂₁ₘ is D, H, K, N, Q, or R;
   [0191] X₂₃ₘ is A, G, I, L, N, S, T, or V;
   [0192] X₂₄ₘ is F, H, I, K, L, M, N, Q, V, W, or Y; and
   [0193] X₃ₘ, X₄ₘ, X₅ₘ, X₇ₘ, X₈ₘ, X₁₁ₘ, X₁₃ₘ, X₁₅ₘ, X₁₆ₘ, X₁₈ₘ, and X₂₂ₘ, are each individually selected from any amino acid,

[0194] or active fragments thereof, or a nucleic acid encoding thereof; and

[0195] a first polynucleotide comprising a donor recognition sequence for the recombinase.

[0196] In some embodiments, the systems comprise a polypeptide comprising a recombinase having an amino acid sequence having at least 70% identity to SEQ ID NOs: 88-1183.

[0197] The systems may further comprise a first polynucleotide comprising a donor recognition sequence for the recombinase. In some embodiments, the donor recognition sequence comprises a donor attachment site configured to bind the recombinase. Recognition sites are polynucleotide sequences that comprise any and all sequence elements facilitating recognition by the recombinase enzyme. Attachment sites are those specific polynucleotide sequences that where recombination occurs.

[0198] In some embodiments, the first polynucleotide further comprises a cargo DNA sequence, which is a polynucleotide that is to be delivered or inserted into a target sequence. The cargo DNA sequence may be greater than 1 kilobase pair (e.g., greater than 2 kilobase pairs, greater than 4 kilobase pairs, greater than 6 kilobase pairs, greater than 8 kilobase pairs, greater than 10 kilobase pairs, greater than 15 kilobase pairs, greater than 20 kilobase pairs, or more). In select embodiments, the cargo DNA sequence is greater than 5 kilobase pairs.

[0199] In some embodiments, the first polynucleotide further comprises a recipient recognition sequence for the recombinase. In some embodiments, the system further comprises a second polynucleotide comprising a recipient recognition sequence for the recombinase. In some embodiments, the recipient recognition sequence comprises a recipient attachment sequence configured to bind to the recombinase.

[0200] In some embodiments, the donor recognition sequence, the recipient recognition sequence, or both are pseudo-recognition sequences. Pseudo-recognition sequences” or “pseudosites” refer to a recognition sequences which is not necessarily that which is the native recognition sequence for a given recombinase but rather is sufficient to promote recombination.

[0201] Also provided herein are compositions and cells comprising the disclosed system. In some embodiments, the cell is a eukaryotic cell.

[0202] Further provided herein are methods for altering a target DNA.

[0203] In some embodiments, the methods comprise contacting the target DNA with a polypeptide comprising a recombinase having an amino acid sequence having at least 70% identity to any of SEQ ID NOs: 1-74, active fragments thereof, or a nucleic acid encoding thereof. In some embodiments, the recombinase has an amino acid sequence having at least 70% identity to any of SEQ ID NOs: 2, 6, 10, 12, 18, 19, 26, 29, 61, 65, or 66. In certain embodiments, the recombinase has an amino acid sequence of SEQ ID NOs: 2, 6, 10, 12, 18, 19, 26, 29, 61, 65, or 66.

[0204] In some embodiments, the methods comprise contacting the target DNA with a polypeptide comprising a recombinase having an amino acid sequence with at least 70% identity to one or more of the following:
[0205] 1) X₁ₐX₂ₐX₃ₐX₄ₐX₅ₐX₆ₐX₇ₐX₈ₐX₉ₐX₁₀ₐX₁₁ₐX₁₂ₐX₁₃ₐX₁₄ₐX₁₅ₐX₁₆ₐX₁₇ₐX₁₈ₐX₁₉ₐX₂₀ₐX₂₁ₐX₂₂ₐX₂₃ₐX₂₄ₐX₂₅ₐX₂₆ₐX₂₇ₐX₂₈ₐX₂₉ₐX₃₀ₐX₃₁ₐX₃₂ₐX₃₃ₐX₃₄ₐ, wherein:
   [0206] X₁ₐ is A, E, I, L, S, T, V, or Y;
   [0207] X₂ₐ is A, D, E, G, K, Q, R, S, or T;
   [0208] X₆ₐ is E or G;
   [0209] X₈ₐ is A, C, F, L, M, or V;
   [0210] X₁₀ₐ is A, F, I, L, M, T, or V;
   [0211] X₁₃ₐ is F, H, I, L, M, N, or V;
   [0212] X₁₄ₐ is A, G, S, or V;
   [0213] X₁₅ₐ is A, D, I, L, S, T, or V;
   [0214] X₁₇ₐ is A, G, or S;
   [0215] X₂₁ₐ is K, R, S, or V;
   [0216] X₂₂ₐ is A, D, E, G, K, N, S, or T;
   [0217] X₂₃ₐ is A, E, I, K, M, N, Q, S, or T;
   [0218] X₂₄ₐ is F, I, L, M, S, or T;
   [0219] X₂₆ₐ is D, E, L, Q, S, or V;
   [0220] X₂₇ₐ is E, N, Q, or R;
   [0221] X₃₂ₐ is A, F, H, I, K, L, M, N, Q, R, S, or V
   [0222] X₃₄ₐ is A, E, G, H, K, L, M, N, Q, R, S, or V; and
   [0223] X₃ₐ, X₄ₐ, X₅ₐ, X₇ₐ, X₉ₐ, X₁₁ₐ, X₁₂ₐ, X₁₆ₐ, X₁₈ₐ, X₁₉ₐ, X₂₀ₐ, X₂₅ₐ, X₂₈ₐ, X₂₉ₐ, X₃₀ₐ, X₃₁ₐ, and X₃₃ₐ are each individually selected from any amino acid;
[0224] 2) X_{1b}X_{2b}X_{3b}X_{4b}X_{5b}X_{6b}X_{7b}X_{8b}X_{9b}X_{10b}X_{11b}X_{12b}X_{13b}X_{14b}X_{15b}X_{16b}X_{17b}X_{18b}, wherein
   [0225] X_{1b} is A, G, or I;
   [0226] X_{2b} is D, E, G, N, P, S, T, or V;
   [0227] X_{3b} is D, G, N, Q, or S;
   [0228] X_{4b} is A, H, N, Q, R, T, V, or Y;
   [0229] X_{6b} is A, D, E, H, I, L, P, Q, R, T, or Y;
   [0230] X_{7b} is A, D, E, Q, or R;
   [0231] X_{8b} is F, I, K, or L;
   [0232] X_{10b} is D, E, F, G, N, Q, R, S, T, or V;
   [0233] X_{11b} is A, I, L, S, T, or V;
   [0234] X_{12b} is D, E, I, K, L, N, Q, R, S, T, or V;
   [0235] X_{13b} is A, D, E, K, M, N, R, S, T, or V;
   [0236] X_{14b} is A, G, Q, R, S, or T;
   [0237] X_{16b} is A, D, E, K, L, Q, R, or T; and
   [0238] X_{18b} is A, L, M, or V; and
   [0239] X_{5b}, X_{9b}, X_{15b}, and X_{17b} are each individually selected from any amino acid;
[0240] 3) X_{1c}X_{2c}X_{3c}X_{4c}X_{5c}X_{6c}X_{7c}X_{8c}X_{9c}X_{10c}X_{11c}X_{12c}X_{13c}ESX_{16c}X_{17c}KX_{19c}X_{20c}X_{21c}X_{22c}X_{23c}X_{24c}X_{25c}X_{26c}, wherein
   [0241] X_{1c} is A, D, F, I, L, M, N, S, or Y;
   [0242] X_{4c} is A, I, K, M, S, or V;
   [0243] X_{6c} is A, F, G, I, L, M, or V;
   [0244] X_{10c} is Q, R, or T;
   [0245] X_{11c} is A, G, or S;
   [0246] X_{13c} is D, E, G, N, Q, or S;
   [0247] X_{17c} is A, H, K, N, R, S, T, or V;
   [0248] X_{21c} is L, M, R, or Y;
   [0249] X_{22c} is A, I, N, Q, S, T, or V;
   [0250] X_{23c} is A, E, F, I, K, L, N, R, T, or V;
   [0251] X_{25c} is A, F, H, L, N, Q, S, T, or Y;
   [0252] X_{26c} is A, I, L, M, N, R, S, T, V, or Y; and
   [0253] X_{2c}, X_{3c}, X_{5c}, X_{7c}, X_{8c}, X_{9c}, X_{12c}, X_{16c}, X_{19c}, X_{20c}, and X_{24c} are each individually selected from any amino acid;
[0254] 4) X_{1d}X_{2d}X_{3d}X_{4d}X_{5d}X_{6d}X_{7d}X_{8d}X_{9d}X_{10d}X_{11d}X_{12d}X_{13d}X_{14d}X_{15d}X_{16d}X_{17d}X_{18d}X_{19d}X_{20d}X_{21d}X_{22d}X_{23d}X_{24d}X_{25d}X_{26d}X_{27d}X_{28d}, wherein:
   [0255] X_{1d} is E, K, N, T, G, S, L, D, V, A, R, or P;
   [0256] X_{2d} is E, H, I, T, G, S, L, D, V, A, or P;
   [0257] X_{4d} is M, I, T, S, L, V, A, R or P;
   [0258] X_{5d} is E, K, N, I, T, G, S, D, Q, V, A, R, or P;
   [0259] X_{6d} is E, G, S, D, A, R, or P;
   [0260] X_{7d} is I, L, D, A, or R;
   [0261] X_{8d} is M, H, K, T, L, V, Q, D, A, or R;
   [0262] X_{9d} is E, K, I, T, G, S, L, D, Q, V, or A;
   [0263] X_{10d} is E, K, H, D, Q, V, A, or R;
   [0264] X_{11d} is M, H, I, S, L, V, Q, A, or R;
   [0265] X_{12d} is Q, E, K, N, M, S, L, D, V, A, or R;
   [0266] X_{13d} is E, K, H, G, S, L, D, Q, A, or R;
   [0267] X_{14d} is E, Y, K, N, I, H, L, V, or A;
   [0268] X_{16d} is E, K, I, T, G, S, L, D, Q, A, or R;
   [0269] X_{17d} is E, K, H, T, G, D, Q, A, or R;
   [0270] X_{19d} is Q, E, K, N, T, G, S, D, V, A, or R;
   [0271] X_{20d} is Q, E, K, N, T, G, S, V, D, A, or R;
   [0272] X_{21d} is I, S, W, L, V, F, A, or R;
   [0273] X_{22d} is Q, E, M, T, G, S, L, V, D, or A;
   [0274] X_{23d} is E, K, N, I, T, G, S, D, A, R, or P;
   [0275] X_{24d} is E, M, I, L, D, Q, or A;
   [0276] X_{25d} is E, Y, I, L, V, F, A, or R;
   [0277] X_{26d} is E, M, T, G, S, L, D, V, A, or R;
   [0278] X_{27d} is E, K, N, G, S, L, D, Q, A, or R;
   [0279] X_{28d} is Q, E, G, V, D, A, R, or P; and
   [0280] X_{3d}, X_{15d}, and X_{18d} are each individually selected from any amino acid;
[0281] 5) X₁ₑX₂ₑX₃ₑX₄ₑX₅ₑX₆ₑX₇ₑX₈ₑX₉ₑX₁₀ₑX₁₁ₑX₁₂ₑX₁₃ₑX₁₄ₑX₁₅ₑX₁₆ₑX₁₇ₑX₁₈ₑ, wherein:
   [0282] X₁ₑ is A, D, E, H, K, N, Q, R, or S;
   [0283] X₂ₑ is A, D, E, F, G, H, K, M, N, Q, R, S, W, or Y;
   [0284] X₃ₑ is E, F, or Y;
   [0285] X₄ₑ is F, H, L, W, or Y;
   [0286] X₆ₑ is A, D, E, F, I, K, L, M, N, Q, R, S, T, or Y;
   [0287] X₇ₑ is F, I, Q, S, T, or V;
   [0288] X₈ₑ is A, G, K, L, N, R, S, T, or V;
   [0289] X₉ₑ is A, D, E, H, K, N, Q, R, T, or Y;
   [0290] X₁₀ₑ is I, N, Q, or R;
   [0291] X₁₁ₑ is F, I, L, M, Q, or S;
   [0292] X₁₄ₑ is A, G, K, N, or S;
   [0293] X₁₅ₑ is K, M, Q, R, S, T, or V;
   [0294] X₁₈ₑ is A, E, G, K, M, N, S, T, or Y; and
   [0295] X₅ₑ, X₁₂ₑ, X₁₃ₑ, X₁₆ₑ, and X₁₇ₑ are each individually selected from any amino acid;
[0296] 6) WX_{2f}X_{3f}X_{4f}X_{5f}X_{6f}X_{7f}X_{8f}X_{9f}X_{10f}X_{11f}X_{12f}X_{13f}X_{14f}X_{15f}X_{16f}GX_{18f}X_{19f}X_{20f}X_{21f}X_{22f}X_{23f}, wherein:
   [0297] X_{2f} is A, E, H, N, R, S, T, or V;
   [0298] X_{4f} is A, G, N, S, or T;
   [0299] X_{5f} is F, G, L, M, N, Q, S, T, or V;
   [0300] X_{6f} is I, L, P, or V;
   [0301] X_{9f} is I, L, T, or V;
   [0302] X_{14f} is A, C, G, M, Q, R, S, or T;
   [0303] X_{16f} is I, L, V, or Y;
   [0304] X_{18f} is D, E, H, N, Q, or S;
   [0305] X_{20f} is E, H, I, L, M, Q, R. or T;
   [0306] X_{21f} is A, E, F, H, L, N, P, or Y;
   [0307] X_{22f} is C, F, H, K, M, N, Q, R, T, or Y;
   [0308] X_{23f} is D, E, F, I, K, L, N, Q, R, S, T, or V; and
   [0309] X_{3f}, X_{7f}, X_{8f} X_{10f}, X_{11f}, X_{12f}, X_{13f}, X_{15f}, and X_{19f} are each individually selected from any amino acid;
[0310] 7) X_{1g}X_{2g}X_{3g}X_{4g}X_{5g}EX_{7g}X_{8g}X_{9g}X_{10g}X_{11g}X_{12g}RX_{14g}X_{15g}X_{16g}X_{17g}X_{18g}X_{19g}X_{20g}X_{21g}, wherein:
   [0311] X_{1g} is A, G, I, N, S, T, or V;
   [0312] X_{3g} is A, I, or S;
   [0313] X_{5g} is F, I, L, M, or Y;
   [0314] X_{7g} is I or R;
   [0315] X_{10g} is D, I, L, or T;
   [0316] X_{12g} is A, E, I, K, M, Q, or S;
   [0317] X_{14g} is I, T, or V;
   [0318] X_{16g} is A, D, G, R, S, or T;
   [0319] X_{18g} is F, K, L, M, or Y;
   [0320] X_{19g} is A, E, H, I, K, L, M, N, Q, R, V, W, or Y;
   [0321] X_{21g} is A, I, K, L, M, or R; and
   [0322] X_{2g}, X_{4g}, X_{8g}, X_{9g}, X_{11g}, X_{15g}, X_{17g}, and X_{20g} are each individually selected from any amino acid;
[0323] 8) X₁ₕX₂ₕX₃ₕX₄ₕX₅ₕX₆ₕX₇ₕX₈ₕX₉ₕX₁₀ₕX₁₁ₕ, wherein:
   [0324] X₁ₕ is F or Y;
   [0325] X₂ₕ is D, E, K, Q, or S;
   [0326] X₃ₕ is E, K, L, M, or Q;
   [0327] X₄ₕ is K, L, or R;
   [0328] X₅ₕ is K, L, or V;
   [0329] X₇ₕ is G or N;
   [0330] X₈ₕ is D, E, H, K, L, M, or R;
   [0331] X₉ₕ is S or T;
   [0332] X₁₁ₕ is F, H, I, Q, S, T, V, or W; and
   [0333] X₆ₕ and X₁₀ₕ are each individually selected from any amino acid;
[0334] 9) X₁ᵢX₂ᵢX₃ᵢX₄ᵢX₅ᵢX₆ᵢX₇ᵢX₈ᵢX₉ᵢX₁₀ᵢX₁₁ᵢX₁₃ᵢX₁₄ᵢX₁₅ᵢX₁₆ᵢX₁₇ᵢX₁₈ᵢX₁₉ᵢX₂₀ᵢX₂₁ᵢX₂₂ᵢX₂₃ᵢX₂₄ᵢX₂₅ᵢX₂₆ᵢX₂₇ᵢ, wherein:
   [0335] X₁ᵢ is I, L, or V;
   [0336] X₄ᵢ is A, D, F, H, I, L, M, N, Q, S, V, or Y;
   [0337] X₈ᵢ is A, G, or S;
   [0338] X₁₀ᵢ is D, E, I, K, N, Q, R, or S;
   [0339] X₁₁ᵢ is E or Q;
   [0340] X₁₅ᵢ is A or K;
   [0341] X₁₆ᵢ is A, Q, R, or S;
   [0342] X₁₈ᵢ is L, M, or R;
   [0343] X₁₉ᵢ is I, L, Q, R, S, or V;
   [0344] X₂₁ᵢ is A, D, E, G, H, I, Q. R, or S;
   [0345] X₂₂ᵢ is A, K, N, Q, S, T, or V;
   [0346] X₂₃ᵢ is A, H, K, R, W, or Y;
   [0347] X₂₅ᵢ is A, G, H, I, K, Q, R, S, or T;
   [0348] X₂₇ᵢ is C, H, I, K, L, R, or V; and
   [0349] X₂ᵢ, X₃ᵢ, X₅ᵢ, X₆ᵢ, X₇ᵢ, X₉ᵢ, X₁₃ᵢ, X₁₄ᵢ, X₁₇ᵢ, X₂₀ᵢ, X₂₄ᵢ, and X₂₆ᵢ are each individually selected from any amino acid;
[0350] 10) RX₂ⱼX₃ⱼX₄ⱼW, wherein:
   [0351] X₂ⱼ is L, M, Q, or R;
   [0352] X₃ⱼ is A, N, or S; and
   [0353] X₄ⱼ is N, P, S, or T;
[0354] 11) X₁ₖX₂ₖX₃ₖX₄ₖX₅ₖX₆ₖX₇ₖX₈ₖF, wherein:
   [0355] X₁ₖ is I, L, or V;
   [0356] X₂ₖ is A or V;
   [0357] X₄ₖ is A, F, H, I, L, Q, W, or Y;
   [0358] X₅ₖ is I, M, or V;
   [0359] X₇ₖ is E, L, Q, or T;
   [0360] X₈ₖ is A, I, or V; and
   [0361] X₃ₖ and X₆ₖ are each individually selected from any amino acid;
[0362] 12) RX₂ₗX₃ₗX₄ₗX₅ₗX₆ₗX₇ₗX₈ₗX₉ₗX₁₀ₗX₁₁ₗX₁₂ₗX₁₃ₗ, wherein:
   [0363] X₂ₗ is D, K, N, R, S, or V;
   [0364] X₃ₗ is A, D, E, F, G, K, P, Q, or S;
   [0365] X₄ₗ is A, E, I, K, L, S, T, or V;
   [0366] X₅ₗ is any amino acid;
   [0367] X₆ₗ is F, G, I, L, N, or V;
   [0368] X₇ₗ is A, F, I, L, Q, R, V, or Y;
   [0369] X₈ₗ is D, E, I, L, M, N, Q, S, T, or V;
   [0370] X₉ₗ is D, E, F, I, L, M, Q, T, V, or Y;
   [0371] X₁₀ₗ is I, K, L, R, or V;
   [0372] X₁₁ₗ is D, E, K, N, Q, or R;
   [0373] X₁₂ₗ is D, E, F, K, L, N, Q, W, or Y; and
   [0374] X₁₃ₗ is F or L; and
[0375] 13) X₁ₘX₂ₘX₃ₘX₄ₘX₅ₘX₆ₘX₇ₘX₈ₘX₉ₘX₁₀ₘX₁₁ₘX₁₂ₘX₁₃ₘX₁₄ₘX₁₅ₘX₁₆ₘX₁₇ₘX₁₈ₘX₁₉ₘX₂₀ₘX₂₁ₘX₂₂ₘX₂₃ₘX₂₄ₘ, wherein:
   [0376] X₁ₘ is A, E, F, I, L, M, N, Q, S, T, V, or Y;
   [0377] X₂ₘ is A, F, G, I, L, M, R, S, T, or V;
   [0378] X₆ₘ is A, D, E, F, G, H, L, M, N, S, or T;
   [0379] X₉ₘ is D, M, N, or S;
   [0380] X₁₀ₘ is D, E, or Q;
   [0381] X₁₂ₘ is C, F, H, L, T, V, or Y;
   [0382] X₁₄ₘ is A, E, K, L, R, or Y;
   [0383] X₁₇ₘ is A, L, or S;
   [0384] X₁₉ₘ is D, E, K, N, Q, R, or S;
   [0385] X₂₀ₘ is G, I, M, Q, R, T, or V;
   [0386] X₂₁ₘ is D, H, K, N, Q, or R;
   [0387] X₂₃ₘ is A, G, I, L, N, S, T, or V;
   [0388] X₂₄ₘ is F, H, I, K, L, M, N, Q, V, W, or Y; and
   [0389] X₃ₘ, X₄ₘ, X₅ₘ, X₇ₘ, X₈ₘ, X₁₁ₘ, X₁₃ₘ, X₁₅ₘ, X₁₆ₘ, X₁₈ₘ, and X₂₂ₘ, are each individually selected from any amino acid,

[0390] or active fragments thereof, or a nucleic acid encoding thereof.

[0391] In some embodiments, the methods comprise contacting the target DNA with a polypeptide comprising a recombinase having an amino acid sequence having at least 70% identity to any of SEQ ID NOs: 88-1183, active fragments thereof, or a nucleic acid encoding thereof.

[0392] In some embodiments, the target DNA comprises a donor recognition sequence, a recipient recognition sequence, or both. In certain embodiments, the target DNA comprises a recipient attachment sequence configured to bind to the recombinase.

[0393] In some embodiments, the method further comprises contacting the target DNA with a first polynucleotide comprising a donor recognition sequence for the recombinase.

[0394] In some embodiments, the first polynucleotide further comprises a cargo DNA sequence. The cargo DNA sequence may be greater than 1 kilobase pair (e.g., greater than 2 kilobase pairs, greater than 4 kilobase pairs, greater than 6 kilobase pairs, greater than 8 kilobase pairs, greater than 10 kilobase pairs, greater than 15 kilobase pairs, greater than 20 kilobase pairs, or more). In select embodiments, the cargo DNA sequence is greater than 5 kilobase pairs.

[0395] In some embodiments, the donor recognition sequence, the recipient recognition sequence, or both are pseudo-recognition sequences.

[0396] In some embodiments, the target DNA sequence encodes a gene product. In certain embodiments, the target DNA sequence is a genomic DNA sequence.

[0397] In some embodiments, the target DNA is in a cell. In certain embodiments, the cell is a eukaryotic cell (e.g., a human or plant cell). In certain embodiments, the cell is a prokaryotic cell.

[0398] In some embodiments, the contacting comprises introducing one or more components of the system into the cell. In some embodiments, the recombinase, or the nucleic acid encoding thereof, is introduced into the cell before, concurrently with, or after the introduction of the donor polynucleotide.

[0399] In some embodiments, introducing into the cell comprises administering one or more components of the system to a subject (e.g., a human). In certain embodiments, the administering comprises in vivo administration. In certain embodiments, the administering comprises transplantation of ex vivo treated cells comprising one or more components of the system.

[0400] Other aspects and embodiments of the disclosure will be apparent in light of the following detailed description.

### BRIEF DESCRIPTION OF THE DRAWINGS

[0401] FIGS. 1A-1H show the systematic identification of thousands of recombinases and their predicted attachment sites for site-specific and multi-targeting/transposable clades. FIG. 1A is a schematic of a of computational workflow to identify LSRs and attachment sites. Briefly, protein sequences contained in RefSeq and GenBank bacterial isolate genomes were searched to identify sequences containing a “Recombinase” (PF07508) domain. Genomes that contained such a protein were compared with genomes that lacked this protein to determine if the recombinase resided on an integrated mobile genetic element. Once the boundaries of this MGE were identified, the original attachment sites were reconstituted by inspecting the sequences flanking these boundaries. This workflow was an extension of previous smaller scale computational methods (Yang et al. 2014 Nat Methods. 11(12): 1261-1266, incorporated herein by reference in its entirety). FIG. 1B is a phylogenetic tree of the amino acid sequences of representatives of LSR families annotated according to predicted target specificity of each LSR cluster. The figure legend “Unique Integration Targets” specifies the number of predicted target protein families that each LSR cluster is found to target in the database. Families labeled with “1” were identified using the technique described in FIG. 1C. Families labeled “2”, “3”, or “>3” were identified as described in panel FIG. 1F. A prominent multi-targeting clade is apparent in the top right portion of the phylogenetic tree shown here. The size of each point indicates the number of unique sequences found in each LSR cluster. FIG. 1C is a schematic of an exemplary technique to identify site-specific LSRs. Briefly, when multiple LSR clusters (clustered at 50% identity) integrate into a single gene cluster (clustered at 50% identity), then all LSR families are considered site-specific. The typical domain architecture of a site-specific LSR is shown on the right, including the Resolvase (green). Recombinase (red), and the Recombinase zinc beta ribbon domain (purple). FIG. 1D is an exemplary observed network of predicted site-specific LSRs. Each node indicates either an LSR cluster (red) or a target protein cluster (blue). Edges between nodes indicate that at least one member of the target protein cluster was found to integrate into at least one member of the target protein cluster. FIG. 1E is an exemplary hierarchical tree of diverse LSR sequences that target a set of closely related attB sequences. The tree is built according to the distance between LSRs according to the percentage of identical amino acids after alignment. An alignment of related attB sequences, in no particular order, is shown below. At the end of the tree, numbers indicating the attB sequences that are targeted by each LSR are shown. The attB alignment is colored according to consensus sequence similarity, with grey indicating a match to the consensus sequence, four unique colors indicating single nucleotide mismatches from the consensus, and black indicating alignment gaps. FIG. 1F is a schematic of an exemplary technique to identify multi-targeting LSRs. Briefly, if a single cluster of related LSRs (clustered at 90% identity) integrate into multiple diverse target protein families (clustered at 50% identity), then the LSR cluster is considered multi-targeting. The typical domain architecture of a multi-targeting LSR, which includes the addition of a domain of unknown function (yellow; DUF4368), is shown on the right. FIG. 1G is an exemplary observed network of predicted multi-targeting LSRs. Node colors and sizes are the same as in FIG. 1D. FIG. 1H is an alignment of diverse attB sequences that are targeted by a single multi-targeting LSR. Each target sequence is aligned with respect to the core TT dinucleotide. Showing a sequence logo above the alignment to indicate conservation across target sites, implying the sequence specificity of this particular LSR. The alignment is colored according to the consensus, the same as in FIG. 1E.

[0402] FIGS. 2A-2N show characterization of new landing pad LSRs. FIG. 2A is a schematic of an exemplary plasmid recombination assay. Cells are co-transfected with LSR-2A-GFP, promoter-less attP-mCherry, and EF1a-attB. Upon recombination, mCherry gains the EF1a promoter and is expressed. FIG. 2B is a plasmid recombination assay of predicted LSRs and att sites in HEK293FT cells. Shown is the fold change of mCherry mean fluorescence intensity (MFI) of all single cells compared to Bxb1. Dots show mean, error bars show standard deviation (n=3 transfection replicates). FIG. 2C is exemplary mCherry distributions for all three plasmids (LSR+attB+attP) compared to the attP-only negative control. Cells are not gated for any transfection delivery markers. FIG. 2D is a plasmid recombination assay between all pairs of LSR+attP and attB in K562 cells (n=1). FIG. 2E is a schematic of an exemplary genomic landing pad assay. An EF1a promoter, attB, and LSR are integrated into the genome of K562 cells via low MOI lentivirus, resulting in a single copy of the landing pad per cell. Clonal cell lines are then electroporated with the attP-mCherry donor plasmid. Upon successful integration into the landing pad, mCherry is expressed, and the LSR and GFP are knocked out. FIG. 2F is flow cytometry of mCherry⁺ cells 11 days after donor electroporation with 1000 ng donor plasmid. Each point is a different clonal K562 cell line carrying the landing pad and LSR corresponding with the donor. Pa01 is significantly more efficient than BxB1 comparing between conditions with donor electroporation (**=P<0.005, one-way ANOVA). FIG. 2G is flow cytometry showing knockout of LSR-GFP and integration of mCherry in the same cells. Pa01 clonal landing pad line was electroporated with donor twice to increase donor delivery, resulting in >70% mCherry⁺ cells. FIG. 2H is flow cytometry of mCherry⁺ cells 18 days after LSR and donor co-electroporation into WT K562 cells that lack a landing pad. attD donor contains its own EF1a promoter and attD donor-only is a negative control. FIG. 2I shows genome-wide integration site mapping by next generation sequencing to measure the percentage of reads found in the genome outside the expected landing pad. Raw (non-unique) reads found at off-targets are shown as a percentage of all reads (*=P<0.05, one-tailed t-test). For Kp03, Ec03, and Pa01, n=2 independent clonal landing pad lines with maximal mCherry 11 days post donor electroporation. For Bxb1, showing two technical replicates of a single clonal landing pad line with maximal mCherry 11 days post donor electroporation. Numbers near the top of each bar indicate (Total number of unique off-target reads)/(Total number of off-target loci). FIG. 2J is a plasmid recombination assay of second batch of predicted LSRs and att sites in HEK293FT cells. Shown is the fold change of mCherry mean fluorescence intensity (MFI) of all single cells compared to Bxb1. Dots show mean, error bars show standard deviation (n=3 transfection replicates). FIG. 2K is exemplary mCherry distributions for three plasmids (LSR+attB+attP), as indicated, compared to the attP-only negative control. Cells were not gated for any transfection delivery markers. FIG. 2L is a graph of the efficiency of promoterless-mCherry donor integration into a polyclonal genomic landing pad (LP) K562 cell lines, measured after 5 days (n=2 independently transduced and then electroporated biological replicates). Asterisks show statistical significance for landing pad plus donor conditions compared to Bxb1 (one-way ANOVA with Dunnett's multiple comparisons est, * is P<0.05, *** is P<0.001, **** is P<0.0001. n.s. is not significant). FIG. 2M shows donor plasmid integration into clonal landing pad cell lines electroporated with 1000 ng donor plasmid (10 days after electroporation, left) or 3000 ng donor plasmid (11 days after electroporation, right). 1000 ng Pa01 is significantly more efficient than 1000 ng Bxb1 comparing between conditions with donor electroporation (P<0.005, one-way ANOVA, n=3 clonal cell lines for Pa01 and n=4 clonal cell lines for others at 1000 ng dose with one electroporation per clone, and n=2 clonal cell lines per LSR at 3000 ng dose with two electroporation replicates per clone, error=s.e.m.). Dots on the left show individual clones, dots on the right show electroporation replicates and each individual clone is separately vertically aligned. FIG. 2N shows representative mCherry distributions for three plasmids (LSR+attB+attP), as indicated, compared to the attP-only negative control.

[0403] FIGS. 3A-3K show genome-targeting LSRs can integrate into the human genome at predicted target sites. FIG. 3A is a schematic representation of computational strategy to identify LSRs with innate affinity for the human genome. Briefly, attB/attP candidates in the database were searched against the human genome using BLAST. The attachment site that best matched the human genome would be renamed the attA(cceptor), and the human genome target site would be renamed the attH(uman). The attachment site that did not match the genome would become the attD(onor). FIG. 3B is BLAST hits of attB/P sites that are homologous to sequences in the human genome. Attachment sites for quality-controlled LSR predictions were searched against the human genome using BLAST. Showing all hits that meet E<0.01. Showing four candidates in red that were later shown experimentally to integrate at the predicted target site in the integration site mapping assay. Showing 22 autosomal chromosomes, starting with chromosome 1 in dark blue on the left, and alternating colors with light blue every other chromosome. FIG. 3C is plasmid recombination assay results for LSRs with predicted pseudosites using cognate predicted attachment sites. Candidates shown in red are considered active LSRs with predicted pseudosites (one-tailed t-test, P<0.05), while candidates in grey are candidates with predicted pseudosites that are considered inactive (P>0.05). Highlighting controls and candidates that were validated in the integration site mapping assay. Several of these candidates did not meet quality control filters overall, but were selected due to high similarity between their attachment sites and the human genome. An analysis of how validation rate changes according to candidate quality is shown in FIG. 4A. FIG. 3D shows the BLAST alignments of the microbial attachment sites (attA) to the predicted human attachment sites (attH) for three candidates (SEQ ID NOs: 3494-3499 for attA and attH for Sp56, Pf80, and Enc3, respectively). The attA is shown on the top of each alignment, while the attH is shown on the bottom. FIG. 3E is graphs of the results of integration site mapping experiment to determine true integration at predicted target sites. Integration sites are ranked according to the number of unique reads found at each site. For Sp56 and Pf80, the locus with the most reads corresponded to the predicted locus. For Enc3, the predicted locus was not the most frequently targeted locus, but was still validated as a true integration site. FIG. 3F shows reads that align (in the forward direction (red) and those aligning in the reverse direction (blue), with a black line connected paired reads) to the integration sites for Pf80 in the human genome, showing the predicted target site. FIG. 3G is a graph of human integration assay results of the top candidate from the most recent batch of LSR candidates. While on-target integration was able to be detected for previous genome-targeting candidates, the overall integration efficiency still remains quite low. A new set of predicted genome-targeting candidates, and Dn29 and Vp82 emerged as a top candidates, with 4.5% (+/−0.13%) and 2.52% (+/−0.004%) corrected integration efficiency, respectively. PhiC31 is a previously known genome targeting LSR used as a control, although its efficiency is below the limit of detection (˜1% of cells). Bars are mean, dots are individual transfections. Error=s.d. (*=P<0.05, one-tailed t-test). FIG. 3H shows integration site mapping results for Dn29, and Vp82. Top 3 targeted human genome sites are labeled in each panel. The most commonly targeted site for Dn29 accounts for ˜17% of detected reads, suggesting that this candidate has as favorable mix of efficiency and specificity. FIG. 3I shows target site motif of the top 25 human genome target sites for genome-targeting candidate Dn29. attA sites are SEQ ID NOs: 3500-3503 top to bottom. FIG. 3J shows target site motif of the top 25 human genome target sites for genome-targeting candidate Vp82. attA sites are SEQ ID NOs: 3504-3507 top to bottom. FIG. 3K show LSR integration specificity vs. efficiency. Black points indicate integration into wild-type cells, green points indicate integration into cells with pre-installed landing pads (FIG. 2E). Selected LSRs are labeled. For wild-type cells, efficiency is estimated as percent of mCherry+cells 18 days after electroporation with an LSR and an mCherry expressing donor plasmid corrected by a donor only control transfection. For landing pad cells, efficiency is estimated as the mean of mCherry+cells in all clones of FIG. 2G, right. To estimate specificity, UMI counts were used if available, otherwise uniquely mapped read counts were used, and counts were merged across replicates. FIG. 3L shows the top three integration sites for Dn29, shown in their genomic context. The red line indicates the exact position of integration, with introns and exons of nearby genes in blue.

[0404] FIGS. 4A-4G show multi-targeting LSRs are highly efficient and reusable. FIG. 4A is a graph of co-transfection of LSR Cp36 and attD-mCherry donor plasmid to K562 cells without a landing pad. Bxb1 paired with Cp36 attD donor was used as a negative control. The dose in ng refers to the LSR plasmid and the attD donor plasmid was delivered at a 1:1 molar ratio. FIG. 4B is a graph of integration site mapping assay results for Cp36. An integration locus was defined in this experiment as a detected integration of a donor cargo at a specific location. The top 500 loci across two experiments are shown, one performed in HEK293FT cells and another performed in K562 cells. Unique reads result in conservative count estimates for loci with higher coverage. The sequences of sites indicated by arrows are shown at the bottom of FIG. 4C. FIG. 4C is Cp36 target site motifs and example target sequences. Precise integration sites and orientations were inferred at all loci, and nucleotide composition was calculated for the top 200 sites in the HEK293FT and K562 experiments. The core dinucleotide is found at the center. Example integration sites are shown below, colored according to nucleotides (SEQ ID NOs 3508-3512). FIG. 4D is a graph of efficiency of Cp36 vs. PiggyBac (PB) for stable delivery of mCherry donor plasmid in K562 cells, 10 days post-transfection. The donor plasmid contains both the Cp36 attD and the PiggyBac ITRs and Ec03 LSR is used as a negative control that lacks an attachment site on this donor plasmid. FIG. 4E is a graph of mCherry integration efficiency of Cp36, with and without redosing with Cp36 at day 15. FIG. 4F is a graph of wild-type K562 or Cp36-dosed mCherry+ and puromycin-selected cells transfected with a second fluorescent reporter (mTagBFP2) and analyzed by flow cytometry 13 days post-electroporation with 2000 ng of BFP donor and an equimolar dose, 1600 ng, of Cp36 plasmid. Bars show the mean, dots show replicates, error=s.e.m. (n=2 electroporation replicates). Dash shows negative control treated with BFP donor only. Corresponding mCherry levels are shown in FIG. 11D. FIG. 4G is flow cytometry analysis 12 days post-electroporation of both fluorescent donors and Cp36 plasmids into K562 cells. Negative control cells were transfected with the donors and pUC19. Error=s.e.m. (n=2 electroporation replicates).

[0405] FIG. 5A is a phylogenetic tree of 1081 LSR clusters (50% identity) identified. Tips are colored according to the phylum of bacterial host species. First heat map ring is colored according to the number of unique target gene clusters that each LSR cluster is predicted to integrate into, the same as in FIG. 1B. The second ring of green annotations indicate LSR clusters that are predicted to contain the DUF4368 Pfam domain. Clusters for controls Bxb1 and PhiC31 are indicated in bold text, and clusters for select candidates with experimental validation are also indicated. FIG. 5B shows the Pfam domains that are most commonly found in target genes. Each target gene was annotated using Pfam HMM models, and then the total number of LSR clusters that integrate into genes containing each Pfam domain was calculated. FIG. 5C shows an alignment of LSR sequences that are presented in FIG. 1E. Resolvase, Recombinase, and Zn_recomb_ribbon Pfam domains are indicated. Above each aligned amino acid position, the height and color of each bar indicates the mean pairwise identity over all pairs in the column, with green indicating 100% identity across all sequences, green-brown indicating above 30% identity and below 100% identity, and red indicating below 30% identity. FIG. 5D shows exemplary predicted attB motifs. Each column represents a different LSR attB motif. The first row shows motifs that were derived from different attB sequences that were all targeted by a single, unique LSR protein. The second row shows motifs that were derived from attB sequences that were targeted by LSR proteins that fell into a single 90% identity cluster. The third row shows motifs that were derived from attB sequences that were targeted by LSR proteins that fell into a single 50% identity cluster. FIG. 5E is Pfam domain enrichment analysis of target genes. Pfam domains that reach a significance cutoff of FDR<0.05 are shown. Pfam domains are ordered and displayed according to the −log 10(P) value of a Fisher's exact test. Numbers next to each point indicate the total number of target gene clusters that contain the specified domain. FIG. 5F is gene ontology (GO) term enrichment analysis of target genes. All 6 terms that reach a significance cutoff of FDR<0.1 are shown. Terms are ordered and displayed according to the −log 10(P) value of a Fisher's exact test. Numbers next to each point indicate the total number of target gene clusters that fall under the specified GO term. FIG. 5G shows distances between target genes and the nearest phage defense gene. For each target gene that appears on a contiguous sequence with a defense gene, the distance is calculated, and then a random gene from the same contiguous sequence is selected as a background control. Showing boxplot with median, 1st and 3rd quartiles, 1.5×IQR as whiskers, and outliers as points. Wilcoxon rank-sum test used to test for significant differences between groups.

[0406] FIGS. 6A-6O show characterization of landing pad LSRs. FIG. 6A is a graph of the efficiency of promoterless-mCherry donor integration into a genomic landing pad (LP) in K562 cells measured by flow cytometry. Landing pad and donor are the same constructs shown in FIG. 2E, but here polyclonal landing pad lines were derived by high MOI delivery of the lentiviral landing pad without any subsequent selection or sorting. 1.2 million K562 cells were electroporated with 600 ng donor plasmids with attP corresponding to the LSR and measured after 5 days (n=2 independently transduced and then electroporated biological replicates). Asterisks show statistical significance for landing pad plus donor conditions compared to BxB1 (one-way ANOVA with Dunnett's multiple comparisons test, * is P<0.05, *** is P<0.001, **** is P<0.0001, n.s. is not significant). FIG. 6B is a graph of the stability of polyclonal landing pads expressing LSR-GFP as measured by flow cytometry over time. These cells are not electroporated with donor and day 5 was the same day of measurement as for FIG. 6D (n=2 independently transduced biological replicates). FIG. 6C is flow cytometry measuring mCherry⁺ cells 10 days after electroporation with 2000 ng donor plasmid. Each point is a different clonal K562 cell line carrying the landing pad and LSR corresponding with the donor. Error bar shows standard deviation for conditions with multiple clones. FIG. 6D is flow cytometry measuring mCherry⁺ cells 12 days after electroporation with 2000 or 5000 ng donor plasmid into clonal K562 cell lines carrying the landing pad. Error bar shows standard deviation (n=3 electroporation replicates shown as dots). FIG. 6E shows the minimization of Pa01 attB sequence by trimming nucleotides from either end and using the plasmid recombination assay. Arrows indicate shortest attB which did not disrupt recombination activity. The inferred 33 bp minimal attB as determined by this experiment is shown between vertical lines at the bottom within SEQ ID No: 3513 shown. Colored rectangles show mean corrected mCherry MFI (n=3 transfection replicates in HEK293FT cells). The attB in the top rectangle extends in both directions and is the full length attB as retrieved from the LSR database and used in FIGS. 2B-2C. FIG. 6F shows minimization of Kp03 attB sequence by trimming nucleotides from both ends using the plasmid recombination assay. The shortest tested attB was 25 nucleotides. Colored rectangles show mean mCherry MFI normalized to attD only MFI (n=3). The attB in the top rectangle extends in both directions and is the full length attB as retrieved from the LSR database and used in FIGS. 2B-2C. The dinucleotide core, as determined by off-target integration site mapping, is shown in bold text within SEQ ID No: 3514 shown. FIG. 6G is a graph of Kp03 dinucleotide core swapping in plasmid recombination assay to determine the capacity to program specific matches between donors and acceptor attachment sites by changing the core. AC is the native dinucleotide core sequence. Values are mean±SD with n=3 transfection replicates in HEK293FT cells. FIG. 6H is a target site motif of the top 25 human genome target sites for landing pad candidates Kp03 (top) and Pa01 (bottom). Core dinucleotides are strongly conserved among integration sites for both candidates. FIG. 6I is a schematic of optimized integration site mapping assay, a modified version of UdiTaS. Addition of a round of amplification using a nested donor primer is expected to enrich for desired target-derived reads, which includes both donor-only reads and donor-genome junction reads. FIG. 6J is a graph of the proportion of reads derived from different sources in the integration site mapping assay. On the left, the proportions before assay optimization, and after optimization on the right. Both runs are of Cp36 circular donor experiments, but in two different cell types (HEK293FT on the left, K562 on the right). Target-derived reads are those that come from the donor only (light green) or the donor-genome integration junction reads (dark green). FIG. 6K is flow cytometry measuring mCherry⁺ cells 18 days after LSR and donor co-electroporation into WT K562 cells that lack a landing pad. attD donor contains its own EF1a promoter and attD donor-only is a negative control. FIG. 6L shows the results from a plasmid recombination assay of predicted LSRs and att sites in HEK293FT cells, as percentage of mCherry+cells gated on GFP positive cells. mCherry and GFP gating is determined based on an empty backbone transfection. Dots show each transfection replicate, error=s.d. (n=3 transfection replicates). FIG. 6M is a graph of the fraction GFP+cells in clonal cell lines 27 days after transduction. GFP+cells were sorted into wells as single cells to generate clonal lines, expanded for two weeks, measured by flow cytometry, and graded as GFP+ if the population was >95% GFP+, suggesting a lack of transcriptional silencing. Sixteen wells were sorted for each LSR, and the number of wells with a live cell population at the time of flow analysis is shown in the legend. For all LSRs, some wells were empty, possibly due to a sorting miss or cell death. FIG. 6N is a graph of flow cytometry measuring mCherry+cells 18 days after LSR and donor co-electroporation into WT K562 cells that lack a landing pad. attD donor contains an EF-1α promoter driving mCherry expression and attD donor transfected with a non-matching LSR is a negative control (*=P<0.05, **=P<0.005, one-tailed t-test) (error=s.d. n=2 transfection replicates). FIG. 6O shows genome-wide integration site mapping by next generation sequencing to measure the percentage of reads found in the genome outside the expected landing pad. For Kp03. Ec03, n=2 independent clonal landing pad lines were used, and for Pa01 n=3 clonal landing pad lines were used, with maximal mCherry 11 days post donor electroporation. For Bxb1, three technical replicates (starting from different gDNA aliquots) of a single clonal landing pad line with maximal mCherry 11 days post donor electroporation are shown. Raw (non-unique) reads found at off-targets as a percentage of all reads are shown (*=P<0.05, one-tailed t-test). Numbers near the top of each bar indicate the total number of off-target loci on the left, and below in parentheses are the subset of those sites that replicate in landing pad cell lines (left) and the subset that replicate in wild-type cell lines (right).

[0407] FIGS. 7A-7F show characterization of genome-targeting. FIG. 7A is a graph of the proportion of LSRs that mediate significant recombination in the plasmid recombination assay with and without application of quality control (QC) thresholds for LSR candidate selection. The numbers above each bar indicate the (number of candidates that met P<0.05 in the plasmid recombination assay)/(total number of tested candidates). FIG. 7B is a graph of a plasmid recombination assay for top genome-targeting candidates using predicted attH sites. FIGS. 7C and 7D show reads that align (in the forward direction (red) and those aligning in the reverse direction (blue), with a black line connected paired reads) to the integration sites for Sp56 and Enc3, respectively, in the human genome. The orientation and location of the integration changes when using a linear donor, whereas the exact predicted integration site is targeted with a circular donor. FIGS. 7E and 7F show the target site motifs for Dn29 and Vp82, respectively. On each row, motifs are shown with different subsets of the integration sites.

[0408] FIG. 8A are graphs of Cp36 mCherry donor cargo integration in K562 cells without pre-installation of a landing pad or antibiotic selection utilizing both plasmid DNA and linear PCR amplicons as the donor cargo. FIG. 8B is a graph of additional multi-targeting LSRs validated using the pseudosite integration assay. Showing two additional candidates, Pc01 and Enc9, which are both found in the multi-targeting clade. FIG. 8C is a schematic of the integration sites found for Cp36 using the integration site mapping assay. FIG. 8D is a schematic of a plasmid recombination assay with swapped att sites and the results for Cp36 compared with multiple landing pad LSRs. FIG. 8E is a schematic of an exemplary plasmid used for direct comparison of Cp36 and PiggyBac containing both the PB inverted terminal repeats (ITRs) and the Cp36 attD.

[0409] FIG. 9 is a schematic of the canonical (can.) LSR integration mechanism. Briefly, an LSR protein (composed of three distinct domains and a coiled coil structural motif) recognizes an attP sequence of nucleotides on a donor plasmid and an attB sequence on a target genome. Four LSR monomers come together to catalyze recombination between the two attachment sites. This results in a unidirectional reaction that forms the final integrated product.

[0410] FIG. 10 shows a phylogenetic tree of identified LSRs with phylogenetic clades, which include 2 or more experimentally active LSRs which descend from a common ancestor.

[0411] FIGS. 11A-11F show multi-targeting recombinases are efficient and unidirectional integrases. FIG. 11A shows the correlation between read counts from the Cp36 integration site mapping assay across HEK293FT and K562 cell lines. The top 61 shared loci, all of which are found among the top 200 most frequently targeted sites in the two cell types are shown. The gray band indicates the 95% confidence interval. FIG. 11B shows enrichment of target sites in DNase hypersensitivity peaks for several multi-targeters. Fisher's exact test was used to calculate statistical significance of each enrichment. P-values and number of relevant integration sites are shown above each relevant lane. Error bars indicate the 95% confidence interval. FIG. 11C shows target site motif as predicted using 33 attB sequences in the LSR-attachment site database that are targeted by LSRs that fall in the same 50% amino acid identity cluster as Cp36. Method used to construct this motif is the same as in FIGS. 1H and 5G. Schematic on the left of FIG. 11D depicts a Cp36 re-dosing experiment wherein Cp36 and an mCherry donor are used to generate mCherry+cells, and then Cp36 enzyme or the empty LSR expression backbone is re-dosed, followed by flow cytometry to measure possible excision of the mCherry cargo. FIG. 11D on the right, shows the mean percentage of mCherry+cells on day 18 as measured by flow cytometry (n=2 transfection replicates). FIG. 11E shows delivery of the BFP donor alone. K562 cells were electroporated with 2400 ng of Cp36 plasmid and 3000 ng of BFP donor plasmid and BFP was measured by flow cytometry after 12 days. Dash refers to unelectroporated cells, and the Cp36- or donor-only conditions include pUC19 stuffer plasmid so the mass delivered is equal. Bars show mean, dots show replicates. FIG. 11F shows Cp36-dosed mCherry+ and puromycin-selected cells analyzed by flow cytometry 13 days postelectroporation with 2000 ng of BFP donor and an equimolar dose. 1600 ng, of Cp36 plasmid (or pUC19 stuffer plasmid). Bars show the mean, dots show replicates (error=s.e.m. n=2 electroporation replicates). Dash shows unelectroporated control.

[0412] FIGS. 12A-12C show post hoc identification of human genome integration sites using database sequence motifs. FIG. 12A shows the performance of database-derived sequence motifs to predict human genome integration sites as measured by ROC curve analysis. Sequence motifs for each LSR were automatically generated from the bacterial sequence database by selecting non-redundant (95% nucleotide identity) attB sequences of related LSR orthologs. These motifs were then searched against true integration sites and randomly selected background sequences using the HOMER motif analysis software. ROC curves were generated by sliding across a relevant range of motif score cutoffs and calculating the false positive rate (x-axis) and true positive rate (y-axis) at each cutoff. The area under the curve (AUC) was then calculated as a single measure of predictive performance. Each ROC curve is labeled with the relevant LSR name and the number of integration sites detected across all relevant experiments. FIG. 12B shows distributions of normalized HOMER motif scores in experimentally observed integration sites (“Obs.”) vs. randomly selected background sequences (“Rand.”). Showing boxplot with median, 1st and 3rd quartiles, 1.5×IQR as whiskers, and outliers as points. One-sided Wilcoxon rank-sum test used to test for significant differences between groups (** is P<0.01, **** is P<0.0001, n.s. is not significant). Red points indicate the normalized HOMER motif score for the observed integration site with the most experimentally detected integration events relative to all other integration sites for each LSR. FIG. 11C shows the final sequence motifs used to predict human genome integration sites for each LSR. Each sequence is labeled with the relevant LSR, the number of attB sequences used to build the motif, and the mean percentage amino acid identity of all the LSR orthologs that were used to identify related attB sequences.

### DETAILED DESCRIPTION

[0413] Described herein are large serine recombinases (LSRs) identified along with their cognate DNA attachment sites using a computational workflow. The LSRs were characterized according to three separate technological applications: 1) landing-pad LSRs that can integrate efficiently at a pre-installed integration site, 2) multi-targeting LSRs that can integrate efficiently at many different loci in a target genome, and 3) genome-targeting LSRs that can integrate at one or several specific target sites in a given target genome. Several candidates in all three of these categories were validated in human cells. For landing-pad LSRs, many candidates were identified that recombined at orthogonal attachment sites at high efficiency when compared to Bxb1, the existing gold standard. For multi-targeting LSRs, which have not previously been developed as an integration tool in human cells, several were identified that can integrate at high efficiency in human cell lines relative to ΦC31. For genome-targeting LSRs, several candidates that integrate DNA cargos into predicted human genome target sites without pre-installation of an attachment site were identified and validated.

[0414] Recombinases have vast applications as genome engineering tools. However, efficient genome integration of large donor sequences into the human genome is an outstanding problem in the field of human genome engineering. One major hurdle is the cargo size limit of adeno-associated virus (AAV) vector, the most successful vector available for human genome engineering, which is around 4.7 kilobase pairs (kb). CRISPR-Cas9 can be used to introduce double-stranded breaks at programmable locations, but when followed by homologous recombination to introduce new DNA, the efficiency of integration decreases exponentially as the size of the insertion increases, with reported maximum insertion sizes of 3-6 kb. By contrast, for recombinases, there is no obvious upper limit on the size of the donor DNA to be integrated, which is a major advantage of recombinases over other technologies.

[0415] Section headings as used in this section and the entire disclosure herein are merely for organizational purposes and are not intended to be limiting.

### 1. DEFINITIONS

[0416] The terms “comprise(s),” “include(s),” “having,” “has,” “can,” “contain(s),” and variants thereof, as used herein, are intended to be open-ended transitional phrases, terms, or words that do not preclude the possibility of additional acts or structures. The singular forms “a,” “and” and “the” include plural references unless the context clearly dictates otherwise. The present disclosure also contemplates other embodiments “comprising,” “consisting of” and “consisting essentially of,” the embodiments or elements presented herein, whether explicitly set forth or not. As used herein, comprising a certain sequence or a certain SEQ ID NO usually implies that at least one copy of said sequence is present in recited peptide or polynucleotide. However, two or more copies are also contemplated.

[0417] For the recitation of numeric ranges herein, each intervening number there between with the same degree of precision is explicitly contemplated. For example, for the range of 6-9, the numbers 7 and 8 are contemplated in addition to 6 and 9, and for the range 6.0-7.0, the number 6.0, 6.1, 6.2, 6.3, 6.4, 6.5, 6.6, 6.7, 6.8, 6.9, and 7.0 are explicitly contemplated.

[0418] Unless otherwise defined herein, scientific, and technical terms used in connection with the present disclosure shall have the meanings that are commonly understood by those of ordinary skill in the art. The meaning and scope of the terms should be clear; in the event, however of any latent ambiguity, definitions provided herein take precedent over any dictionary or extrinsic definition. Further, unless otherwise required by context, singular terms shall include pluralities and plural terms shall include the singular.

[0419] As used herein, a “nucleic acid” or a “nucleic acid sequence” refers to a polymer or oligomer of pyrimidine and/or purine bases, preferably cytosine, thymine, and uracil, and adenine and guanine, respectively (See Albert L. Lehninger, Principles of Biochemistry, at 793-800 (Worth Pub. 1982)). The present technology contemplates any deoxyribonucleotide, ribonucleotide, or peptide nucleic acid component, and any chemical variants thereof, such as methylated, hydroxymethylated, or glycosylated forms of these bases, and the like. The polymers or oligomers may be heterogenous or homogenous in composition and may be isolated from naturally occurring sources or may be artificially or synthetically produced. In addition, the nucleic acids may be DNA or RNA, or a mixture thereof, and may exist permanently or transitionally in single-stranded or double-stranded form, including homoduplex, heteroduplex, and hybrid states. In some embodiments, a nucleic acid or nucleic acid sequence comprises other kinds of nucleic acid structures such as, for instance, a DNA/RNA helix, peptide nucleic acid (PNA), morpholino nucleic acid (see, e.g., Braasch and Corey, Biochemistry, 41(14): 4503-4510 (2002)) and U.S. Pat. No. 5,034,506), locked nucleic acid (LNA: see Wahlestedt et al., Proc. Natl. Acad. Sci. U.S.A., 97: 5633-5638 (2000)), cyclohexenyl nucleic acids (see Wang, J. Am. Chem. Soc., 122: 8595-8602 (2000)), and/or a ribozyme. Hence, the term “nucleic acid” or “nucleic acid sequence” may also encompass a chain comprising non-natural nucleotides, modified nucleotides, and/or non-nucleotide building blocks that can exhibit the same function as natural nucleotides (e.g., “nucleotide analogs”); further, the term “nucleic acid sequence” as used herein refers to an oligonucleotide, nucleotide or polynucleotide, and fragments or portions thereof, and to DNA or RNA of genomic or synthetic origin, which may be single or double-stranded, and represent the sense or antisense strand. The terms “nucleic acid,” “polynucleotide,” “nucleotide sequence,” and “oligonucleotide” are used interchangeably. They refer to a polymeric form of nucleotides of any length, either deoxyribonucleotides or ribonucleotides, or analogs thereof.

[0420] A “peptide” or “polypeptide” is a linked sequence of two or more amino acids linked by peptide bonds. The peptide or polypeptide can be natural, synthetic, or a modification or combination of natural and synthetic. Polypeptides include proteins such as binding proteins, receptors, and antibodies. The proteins may be modified by the addition of sugars, lipids or other moieties not included in the amino acid chain. The terms “polypeptide” and “protein,” are used interchangeably herein.

[0421] As used herein, the term “percent sequence identity” refers to the percentage of nucleotides or nucleotide analogs in a nucleic acid sequence, or amino acids in an amino acid sequence, that is identical with the corresponding nucleotides or amino acids in a reference sequence after aligning the two sequences and introducing gaps, if necessary, to achieve the maximum percent identity. Hence, in case a nucleic acid according to the technology is longer than a reference sequence, additional nucleotides in the nucleic acid, that do not align with the reference sequence, are not taken into account for determining sequence identity. A number of mathematical algorithms for obtaining the optimal alignment and calculating identity between two or more sequences are known and incorporated into a number of available software programs. Examples of such programs include CLUSTAL-W, T-Coffee, and ALIGN (for alignment of nucleic acid and amino acid sequences), BLAST programs (e.g., BLAST 2.1, BL2SEQ, and later versions thereof) and FASTA programs (e.g., FASTA3×, FAS™, and SSEARCH) (for sequence alignment and sequence similarity searches). Sequence alignment algorithms also are disclosed in, for example, Altschul et al., J. Molecular Biol., 215(3): 403-410 (1990), Beigert et al., Proc. Natl. Acad. Sci. USA, 106(10): 3770-3775 (2009), Durbin et al., eds., Biological Sequence Analysis: Probabilistic Models of Proteins and Nucleic Acids, Cambridge University Press, Cambridge, UK (2009), Soding, Bioinformatics, 21(7): 951-960 (2005), Altschul et al., Nucleic Acids Res., 25(17): 3389-3402 (1997), and Gusfield, Algorithms on Strings, Trees and Sequences, Cambridge University Press, Cambridge UK (1997)).

[0422] The term “amino acid” or “any amino acid” as used here refers to any and all amino acids, including naturally occurring amino acids (e.g., a-amino acids), unnatural amino acids, modified amino acids, and non-natural amino acids. It includes both D- and L-amino acids. Natural amino acids include those found in nature, such as, e.g., the 23 amino acids that combine into peptide chains to form the building-blocks of a vast array of proteins. These are primarily L stereoisomers, although a few D-amino acids occur in bacterial envelopes and some antibiotics. The “non-standard,” natural amino acids include, for example, pyrolysine (found in methanogenic organisms and other eukaryotes), selenocysteine (present in many non-eukaryotes as well as most eukaryotes), and N-formylmethionine (encoded by the start codon AUG in bacteria, mitochondria, and chloroplasts). “Unnatural” or “non-natural” amino acids are non-proteinogenic amino acids (e.g., those not naturally encoded or found in the genetic code) that either occur naturally or are chemically synthesized. Over 140 unnatural amino acids are known and thousands of more combinations are possible. Examples of “unnatural” amino acids include β-amino acids (β³ and β²), homo-amino acids, proline and pyruvic acid derivatives, 3-substituted alanine derivatives, glycine derivatives, ring-substituted phenylalanine and tyrosine derivatives, linear core amino acids, diamino acids, D-amino acids, alpha-methyl amino acids and N-methyl amino acids. Unnatural or non-natural amino acids also include modified amino acids. “Modified” amino acids include amino acids (e.g., natural amino acids) that have been chemically modified to include a group, groups, or chemical moiety not naturally present on the amino acid.

[0423] For the most part, the names of naturally occurring and non-naturally occurring aminoacyl residues used herein follow the naming conventions suggested by the IUPAC Commission on the Nomenclature of Organic Chemistry and the IUPAC-IUB Commission on Biochemical Nomenclature as set out in “Nomenclature of α-Amino Acids (Recommendations, 1974)” Biochemistry, 14(2), (1975). To the extent that the names and abbreviations of amino acids and aminoacyl residues employed in this specification and appended claims differ from those suggestions, they will be made clear.

[0424] Throughout the present specification, unless naturally occurring amino acids are referred to by their full name (e.g., alanine, arginine, etc.), they are designated by their conventional three-letter or single-letter abbreviations (e.g., Ala or A for alanine, Arg or R for arginine, etc.). The term “L-amino acid,” as used herein, refers to the “L” isomeric form of a peptide, and conversely the term “D-amino acid” refers to the “D” isomeric form of a peptide (e.g., Dphe, (D)Phe, D-Phe, or ^{D}F for the D isomeric form of Phenylalanine). Amino acid residues in the D isomeric form can be substituted for any L-amino acid residue, as long as the desired function is retained by the peptide.

[0425] In the case of less common or non-naturally occurring amino acids, unless they are referred to by their full name (e.g. sarcosine, ornithine, etc.), frequently employed three- or four-character codes are employed for residues thereof, including, Sar or Sarc (sarcosine, i.e. N-methylglycine), Aib (α-aminoisobutyric acid), Dab (2,4-diaminobutanoic acid). Dapa (2,3-diaminopropanoic acid), γ-Glu (γ-glutamic acid), Gaba (γ-aminobutanoic acid), β-Pro (pyrrolidine-3-carboxylic acid), and 8Ado (8-amino-3,6-dioxaoctanoic acid), Abu (2-amino butyric acid), βhPro (β-homoproline), βhPhe (β-homophenylalanine) and Bip (β,βdiphenylalanine), and Ida (Iminodiacetic acid).

[0426] The term “pharmaceutically acceptable salt” in the context of the present invention

[0427] The terms “non-naturally occurring,” “engineered,” and “synthetic” are used interchangeably and indicate the involvement of the hand of man. The terms, when referring to nucleic acid molecules or polypeptides mean that the nucleic acid molecule or the polypeptide is at least substantially free from at least one other component with which they are naturally associated in nature and as found in nature.

[0428] A “vector” or “expression vector” is a replicon, such as plasmid, phage, virus, or cosmid, to which another DNA segment, e.g., an “insert,” may be attached or incorporated so as to bring about the replication of the attached segment in a cell.

[0429] A cell has been “genetically modified,” “transformed,” or “transfected” by exogenous DNA, e.g., a recombinant expression vector, when such DNA has been introduced inside the cell. The presence of the exogenous DNA results in permanent or transient genetic change. The transforming DNA may or may not be integrated (covalently linked) into the genome of the cell. In prokaryotes, yeast, and mammalian cells for example, the transforming DNA may be maintained on an episomal element such as a plasmid. With respect to eukaryotic cells, a stably transformed cell is one in which the transforming DNA has become integrated into a chromosome so that it is inherited by daughter cells through chromosome replication. This stability is demonstrated by the ability of the eukaryotic cell to establish cell lines or clones that comprise a population of daughter cells containing the transforming DNA. A “clone” is a population of cells derived from a single cell or common ancestor by mitosis. A “cell line” is a clone of a primary cell that is capable of stable growth in vitro for many generations.

[0430] The term “contacting” as used herein refers to bring or put in contact, to be in or come into contact. The term “contact” as used herein refers to a state or condition of touching or of immediate or local proximity. Contacting a system to a target destination, such as, but not limited to, an organ, tissue, cell, or tumor, may occur by any means of administration known to the skilled artisan.

[0431] As used herein, the terms “providing.” “administering.” “introducing,” are used interchangeably herein and refer to the placement of the systems, recombinases, or nucleic acids of the disclosure into a cell, organism, or subject by a method or route which results in at least partial localization of the system to a desired site. The systems, recombinases, or nucleic acids can be administered by any appropriate route which results in delivery to a desired location in the cell, organism, or subject.

[0432] A “subject” or “patient” may be human or non-human and may include, for example, animal strains or species used as “model systems” for research purposes, such a mouse model as described herein. Likewise, patient may include either adults or juveniles (e.g., children). Moreover, patient may mean any living organism, preferably a mammal (e.g., human or non-human) that may benefit from the administration of compositions contemplated herein. Examples of mammals include, but are not limited to, any member of the Mammalian class: humans, non-human primates such as chimpanzees, and other apes and monkey species: farm animals such as cattle, horses, sheep, goats, swine; domestic animals such as rabbits, dogs, and cats; laboratory animals including rodents, such as rats, mice and guinea pigs, and the like. Examples of non-mammals include, but are not limited to, birds, fish, and the like. In one embodiment of the methods and compositions provided herein, the mammal is a human.

[0433] Preferred methods and materials are described below, although methods and materials similar or equivalent to those described herein can be used in practice or testing of the present disclosure. All publications, patent applications, patents and other references mentioned herein are incorporated by reference in their entirety. The materials, methods, and examples disclosed herein are illustrative only and not intended to be limiting.

### 2. RECOMBINASE SYSTEMS

[0434] The present disclosure provides systems for DNA modification comprising: a polypeptide comprising a recombinase (e.g., a large serine recombinase) having an amino acid sequence having at least 70% identity (e.g., at least 75%, at least 80%, at least 85%, at least 90%, at least 95%, at least 97%, at least 98%, at least 99%, or 100%) to any of SEQ ID NOs: 1-74, or a nucleic acid encoding thereof; and a first polynucleotide comprising a donor recognition sequence for the recombinase. Also provided herein are enzymatically active fragments thereof (e.g., C- or N-terminal truncations or containing internal deletions, but retaining the desired enzymatic activity). The active fragment may contain at least 20 amino acids, at least 30 amino acids, at least 40 amino acids, at least 50 amino acids, at least 100 amino acids, or more of SEQ ID NOs: 1-74 or sequences at least 70% identity to at least 20 amino acids, at least 30 amino acids, at least 40 amino acids, at least 50 amino acids, at least 100 amino acids, or more of SEQ ID NOs: 1-74. In some embodiments, the recombinase has an amino acid sequence having at least 70% (e.g., at least 75%, at least 80%, at least 85%, at least 90%, at least 95%, at least 97%, at least 98%, at least 99%, or 100%) identity to any of SEQ ID NOs: 2, 6, 10, 12, 18, 19, 26, 29, 61, 65, or 66, or an active fragment thereof. In select embodiments, the recombinase has an amino acid sequence of SEQ ID NOs: 2, 6, 10, 12, 18, 19, 26, 29, 61, 65, or 66, or an active fragment thereof.

[0435] The present disclosure also provides systems for DNA modification comprising: a polypeptide comprising a recombinase (e.g., a large serine recombinase), or a nucleic acid encoding thereof; and a first polynucleotide comprising a donor recognition sequence for the recombinase, wherein the recombinase (e.g., a large serine recombinase) comprises one or more of the following amino acid motifs, written in the common Prosite format, where the potential amino acids at any one position are in square brackets, x is any amino acid and x(n) represents n number of any amino acid (e.g., x(3) is xxx or 3 consecutive amino acids):

Motif 1:
[AEILSTVY]-[ADEGKQRST]-x(3)-[EG]-x-[ACFLMV]-x-[AFILMTV]-x(2)-[FHILMNV]-
[AGSV]-[ADILSTV]-x-[AGS]-x(3)-[KRSV]-[ADEGKNST]-[AEIKMNQST]-[FILMST]-x-
[DELQSV]-[ENQR]-x(4)-[AFHIKLMNQRSV]-x-[AEGHKLMNQRSV]
Motif 2:
[AGI]-[DEGNPSTV]-[DGNQS]-[AHNQRTVY]-x-[ADEHILPQRTY]-[ADEQR]-[FIKL]-x-
[DEFGNQRSTV]-[AILSTV]-[DEIKLNQRSTV]-[ADEKMNRSTV]-[AGQRST]-x-
[ADEKLQRT]-x-[ALMV]
Motif 3:
[ADFILMNSY]-x(2)-[AIKMSV]-x-[AFGILMV]-x(3)-[QRT]-[AGS]-x-[DEGNQS]-E-S-x-
[AHKNRSTV]-K-x(2)-[LMRY]-[AINQSTV]-[AEFIKLNRTV]-x-[AFHLNQSTY]-
[AILMNRSTVY]
Motif 4:
[EKNTGSLDVARP]-[EHITGSLDVAP]-x-[MITSLVARP]-[EKNITGSDQVARP]-
[EGSDARP]-[ILDAR]-[MHKTLVQDAR]-[EKITGSLDQVA]-[EKHDQVAR]-
[MHISLVQAR]-[QEKNMSLDVAR]-[EKHGSLDQAR]-[EYKNIHLVA]-x-
[EKITGSLDQAR]-[EKHTGDQAR]-x-[QEKNTGSDVAR]-[QEKNTGSVDAR]-
[SWLVFAR]-[QEMTGSLVDA]-[EKNITGSDARP]-[EMILDQA]-[EYILVFAR]-
[EMTGSLDVAR]-[EKNGSLDQAR]-[QEGVDARP]
Motif 5:
[ADEHKNQRS]-[ADEFGHKMNQRSWY]-[EFY]-[FHLWY]-x-[ADEFIKLMNQRSTY]-
[FIQSTV]-[AGKLNRSTV]-[ADEHKNQRTY]-[INQR]-[FILMQS]-x(2)-[AGKNS]-
[KMQRSTV]-x(2)-[AEGKMNSTY]
Motif 6:
W-[AEHNRSTV]-x-[AGNST]-[FGLMNQSTV]-[ILPV]-x(2)-[ILTV]-x(4)-[ACGMQRST]-x-
[ILVY]-G-[DEHNQS]-x-[EHILMQRT]-[AEFHLNPY]-[CFHKMNQRTY]-[DEFIKLNQRSTV]
Motif 7:
[AGINSTV]-x-[AIS]-x-[FILMY]-E-[IR]-x(2)-[DILT]-x-[AEIKMQS]-R-[ITV]-x-
[ADGRST]-x-[FKLMY]-[AEHIKLMNQRVWY]-x-[AIKLMR]
Motif 8:
[FY]-[DEKQS]-[EKLMQ]-[KLR]-[KLV]-x-[GN]-[DEHKLMR]-[ST]-x-[FHIQSTVW]
Motif 9:
[ILV]-x(2)-[ADFHILMNQSVY]-x(3)-[AGS]-x-[DEIKNQRS]-[EQ]-S-x(2)-[AK]-[AQRS]-
x-[LMR]-[ILQRSV]-x-[ADEGHIQRS]-[AKNQSTV]-[AHKRWY]-x-[AGHIKQRST]-x-
[CHIKLRV]
Motif 10:
R-[LMQR]-[ANS]-[NPST]-W
Motif 11:
[LV]-[AV]-x-[AFHILQWY]-[IMV]-x-[ELQT]-[AIV]-F
Motif 12:
R-[DKNRSV]-[ADEFGKPQS]-[AEIKLSTV]-x-[FGILNV]-[AFILQRVY]-[DEILMNQSTV]-
[DEFILMQTVY]-[IKLRV]-[DEKNQR]-[DEFKLNQWY]-[FL]
Motif 13:
[AEFILMNQSTVY]-[AFGILMRSTV]-x(3)-[ADEFGHLMNST]-x(2)-[DMNS]-[DEQ]-x-
[CFHLTVY]-x-[AEKLRY]-x(2)-[ALS]-x-[DEKNQRS]-[GIMQRTV]-[DHKNQR]-x-
[AGILNSTV]-[FHIKLMNQVWY]

[0436] Alternatively, the motifs can be written as the following, where each position is defined by a designated amino acid or X, wherein Xis the amino acid options in brackets, or any amino acid, as indicated.

### Motif 1:

X₁ₐX₂ₐX₃ₐX₄ₐX₅ₐX₆ₐX₇ₐX₈ₐX₉ₐX₁₀ₐX₁₁ₐX₁₂ₐX₁₃ₐX₁₄ₐX₁₅ₐX₁₆ₐX₁₇ₐX₁₈ₐX₁₉ₐX₂₀ₐX₂₁ₐX₂₂ₐX₂₃ₐX₂₄ₐX₂₅ₐX₂₆ₐX₂₇ₐX₂₈ₐX₂₉ₐX₃₀ₐX₃₁ₐX₃₂ₐX₃₃ₐX₃₄ₐ, wherein:

[0437] X₃ₐ, X₄ₐ, X₅ₐ, X₇ₐ, X₉ₐ, X₁₁ₐ, X₁₂ₐ, X₁₆ₐ, X₁₈ₐ, X₁₉ₐ, X₂₀ₐ, X₂₅ₐ, X₂₈ₐ, X₂₉ₐ, X₃₀ₐ, X₃₁ₐ, and X₃₃ₐ are each individually selected from any amino acid;

[0438] X₁ₐ is A, E, I, L, S, T, V, or Y;

[0439] X₂ₐ is A, D, E, G, K, Q, R, S, or T;

[0440] X₆ₐ is E or G;

[0441] X₈ₐ is A, C, F, L, M, or V;

[0442] X₁₀ₐ is A, F, I, L, M, T, or V;

[0443] X₁₃ₐ is F, H, I, L, M, N, or V;

[0444] X₁₄ₐ is A, G, S, or V;

[0445] X₁₅ₐ is A, D, I, L, S, T, or V;

[0446] X₁₇ₐ is A, G, or S;

[0447] X₂₁ₐ is K, R, S, or V;

[0448] X₂₂ₐ is A, D, E, G, K, N, S, or T;

[0449] X₂₃ₐ is A, E, I, K, M, N, Q, S, or T;

[0450] X₂₄ₐ is F, I, L, M, S, or T;

[0451] X₂₆ₐ is D, E, L, Q, S, or V;

[0452] X₂₇ₐ is E, N, Q, or R;

[0453] X₃₂ₐ is A, F, H, I, K, L, M, N, Q, R, S, or V

[0454] X₃₄ₐ is A, E, G, H, K, L, M, N, Q, R, S, or V

### Motif 2:

X_{1b}X_{2b}X_{3b}X_{4b}X_{5b}X_{6b}X_{7b}X_{8b}X_{9b}X_{10b}X_{11b}X_{12b}X_{13b}X_{14b}X_{15b}X_{16b}X_{17b}X_{18b}, wherein

[0455] X_{5b}, X_{9b}, X_{15b}, and X_{17b} are each individually selected from any amino acid;

[0456] X_{1b} is A, G, or I;

[0457] X_{2b} is D, E, G, N, P, S, T, or V;

[0458] X_{3b} is D, G, N, Q, or S;

[0459] X_{4b} is A, H, N, Q, R, T, V, or Y;

[0460] X_{6b} is A, D, E, H, I, L, P, Q, R, T, or Y;

[0461] X_{7b} is A, D, E, Q, or R;

[0462] X_{8b} is F, I, K, or L;

[0463] X_{10b} is D, E, F, G, N, Q, R, S, T, or V;

[0464] X_{11b} is A, I, L, S, T, or V;

[0465] X_{12b} is D, E, I, K, L, N, Q, R, S, T, or V;

[0466] X_{13b} is A, D, E, K, M, N, R, S, T, or V;

[0467] X_{14b} is A, G, Q, R, S, or T;

[0468] X_{16b} is A, D, E, K, L, Q, R, or T; and

[0469] X_{18b} is A, L, M, or V

### Motif 3:

X_{1c}X_{2c}X_{3c}X_{4c}X_{5c}X_{6c}X_{7c}X_{8c}X_{9c}X_{10c}X_{11c}X_{12c}X_{13c}ESX_{16c}X_{17c}KX_{19c}X_{20c}X_{21c}X_{22c}X_{23c}X_{24c}X_{25c}X_{26c}, wherein

[0470] X_{2c}, X_{3c}, X_{5c}, X_{7c}, X_{8c}, X_{9c}, X_{12c}, X_{16c}, X_{19c}, X_{20c}, and X_{24c} are each individually selected from any amino acid;

[0471] X_{1c} is A, D, F, I, L, M, N, S, or Y;

[0472] X_{4c} is A, I, K, M, S, or V;

[0473] X_{6c} is A, F, G, I, L, M, or V;

[0474] X_{10c} is Q, R, or T;

[0475] X_{11c} is A, G, or S;

[0476] X_{13c} is D, E, G, N, Q, or S;

[0477] X_{17c} is A, H, K, N, R, S, T, or V;

[0478] X_{21c} is L, M, R, or Y;

[0479] X_{22c} is A, I, N, Q, S, T, or V;

[0480] X_{23c} is A, E, F, I, K, L, N, R, T, or V;

[0481] X_{25c} is A, F, H, L, N, Q, S, T, or Y;

[0482] X_{26c} is A, I, L, M, N, R, S, T, V, or Y

### Motif 4:

X_{1d}X_{2d}X_{3d}X_{4d}X_{5d}X_{6d}X_{7d}X_{8d}X_{9d}X_{10d}X_{11d}X_{12d}X_{13d}X_{14d}X_{15d}X_{16d}X_{17d}X_{18d}X_{19d}X_{20d}X_{21d}X_{22d}X_{23d}X_{24d}X_{25d}X_{26d}X_{27d}X_{28d}, wherein:

[0483] X_{3d}, X_{15d}, and X_{18d} are each individually selected from any amino acid;

[0484] X_{1d} is E, K, N, T, G, S, L, D, V, A, R, or P;

[0485] X_{2d} is E, H, I, T, G, S, L, D, V, A, or P;

[0486] X_{4d} is M, I, T, S, L, V, A, R or P;

[0487] X_{5d} is E, K, N, I, T, G, S, D, Q, V, A, R, or P;

[0488] X_{6d} is E, G, S, D, A, R, or P;

[0489] X_{7d} is I, L, D, A, or R;

[0490] X_{8d} is M, H, K, T, L, V, Q, D, A, or R;

[0491] X_{9d} is E, K, I, T, G, S, L, D, Q, V, or A;

[0492] X_{10d} is E, K, H, D, Q, V, A, or R;

[0493] X_{11d} is M, H, I, S, L, V, Q, A, or R;

[0494] X_{12d} is Q, E, K, N, M, S, L, D, V, A, or R;

[0495] X_{13d} is E, K, H, G, S, L, D, Q, A, or R;

[0496] X_{14d} is E, Y, K, N, I, H, L, V, or A;

[0497] X_{16d} is E, K, I, T, G, S, L, D, Q, A, or R;

[0498] X_{17d} is E, K, H, T, G, D, Q, A, or R:

[0499] X_{19d} is Q, E, K, N, T, G, S, D, V, A, or R;

[0500] X_{20d} is Q, E, K, N, T, G, S, V, D, A, or R;

[0501] X_{21d} is I, S, W, L, V, F, A, or R;

[0502] X_{22d} is Q, E, M, T, G, S, L, V, D, or A;

[0503] X_{23d} is E, K, N, I, T, G, S, D, A, R, or P;

[0504] X_{24d} is E, M, I, L, D, Q, or A:

[0505] X_{25d} is E, Y, I, L, V, F, A, or R;

[0506] X_{26d} is E, M, T, G, S, L, D, V, A, or R;

[0507] X_{27d} is E, K, N, G, S, L, D, Q, A, or R;

[0508] X_{28d} is Q, E, G, V, D, A, R, or P; and

### Motif 5:

X₁ₑX₂ₑX₃ₑX₄ₑX₅ₑX₆ₑX₇ₑX₈ₑX₉ₑX₁₀ₑX₁₁ₑX₁₂ₑX₁₃ₑX₁₄ₑX₁₅ₑX₁₆ₑX₁₇ₑX₁₈ₑ, wherein:

[0509] X₅ₑ, X₁₂ₑ, X₁₃ₑ, X₁₆ₑ, and X₁₇ₑ are each individually selected from any amino acid;

[0510] X₁ₑ is A, D, E, H, K, N, Q, R, or S;

[0511] X₂ₑ is A, D, E, F, G, H, K, M, N, Q, R, S, W, or Y;

[0512] X₃ₑ is E, F, or Y;

[0513] X₄ₑ is F, H, L, W, or Y;

[0514] X₆ₑ is A, D, E, F, I, K, L, M, N, Q, R, S, T, or Y;

[0515] X₇ₑ is F, I, Q, S, T, or V;

[0516] X₈ₑ is A, G, K, L, N, R, S, T, or V;

[0517] X₉ₑ is A, D, E, H, K, N, Q, R, T, or Y;

[0518] X₁₀ₑ is I, N, Q, or R;

[0519] X₁₁ₑ is F, I, L, M, Q, or S;

[0520] X₁₄ₑ is A, G, K, N, or S;

[0521] X₁₅ₑ is K, M, Q, R, S, T, or V;

[0522] X₁₈ₑ is A, E, G, K, M, N, S, T, or Y;

### Motif 6:

WX_{2f}X_{3f}X_{4f}X_{5f}X_{6f}X_{7f}X_{8f}X_{9f}X_{10f}X_{11f}X_{12f}X_{13f}X_{14f}X_{15f}X_{16f}GX_{18f}X_{19f}X_{20f}X_{21f}X_{22f}X_{23f}, wherein:

[0523] X_{3f}, X_{7f}, X_{8f} X_{10f}, X_{11f}, X_{12f}, X_{13f}, X_{15f}, and X_{19f} are each individually selected from any amino acid;

[0524] X_{2f} is A, E, H, N, R, S, T, or V;

[0525] X_{4f} is A, G, N, S, or T;

[0526] X_{5f} is F, G, L, M, N, Q, S, T, or V;

[0527] X_{6f} is I, L, P, or V;

[0528] X_{9f} is I, L, T, or V;

[0529] X_{14f} is A, C, G, M, Q, R, S, or T;

[0530] X_{16f} is I, L, V, or Y;

[0531] X_{18f} is D, E, H, N, Q, or S;

[0532] X_{20f} is E, H, I, L, M, Q, R. or T;

[0533] X_{21f} is A, E, F, H, L, N, P, or Y;

[0534] X_{22f} is C, F, H, K, M, N, Q, R, T, or Y;

[0535] X_{23f} is D, E, F, I, K, L, N, Q, R, S, T, or V;

### Motif 7:

X_{1g}X_{2g}X_{3g}X_{4g}X_{5g}EX_{7g}X_{8g}X_{9g}X_{10g}X_{11g}X_{12g}RX_{14g}X_{15g}X_{16g}X_{17g}X_{18g}X_{19g}X_{20g}X_{21g}, wherein:

[0536] X_{2g}, X_{4g}, X_{8g}, X_{9g}, X_{11g}, X_{15g}, X_{17g}, and X_{20g} are each individually selected from any amino acid;

[0537] X_{1g} is A, G, I, N, S, T, or V;

[0538] X_{3g} is A, I, or S;

[0539] X_{5g} is F, I, L, M, or Y;

[0540] X_{7g} is I or R;

[0541] X_{10g} is D, I, L, or T;

[0542] X_{12g} is A, E, I, K, M, Q, or S;

[0543] X_{14g} is I, T, or V;

[0544] X_{16g} is A, D, G, R, S, or T;

[0545] X_{18g} is F, K, L, M, or Y;

[0546] X_{19g} is A, E, H, I, K, L, M, N, Q, R, V, W, or Y;

[0547] X_{21g} is A, I, K, L, M, or R

### Motif 8:

X₁ₕX₂ₕX₃ₕX₄ₕX₅ₕX₆ₕX₇ₕX₈ₕX₉ₕX₁₀ₕX₁₁ₕ, wherein:

[0548] X₆ₕ and X₁₀ₕ are each individually selected from any amino acid;

[0549] X₁ₕ is F or Y;

[0550] X₂ₕ is D, E, K, Q, or S;

[0551] X₃ₕ is E, K, L, M, or Q;

[0552] X₄ₕ is K, L, or R:

[0553] X₅ₕ is K, L, or V;

[0554] X₇ₕ is G or N;

[0555] X₈ₕ is D, E, H, K, L, M, or R;

[0556] X₉ₕ is S or T;

[0557] X₁₁ₕ is F, H, I, Q, S, T, V, or W

### Motif 9:

X₁ᵢX₂ᵢX₃ᵢX₄ᵢX₅ᵢX₆ᵢX₇ᵢX₈ᵢX₉ᵢX₁₀ᵢX₁₁ᵢX₁₃ᵢX₁₄ᵢX₁₅ᵢX₁₆ᵢX₁₇ᵢX₁₈ᵢX₁₉ᵢX₂₀ᵢX₂₁ᵢX₂₂ᵢX₂₃ᵢX₂₄ᵢX₂₅ᵢX₂₆ᵢX₂₇ᵢ, wherein:

[0558] X₂ᵢ, X₃ᵢ, X₅ᵢ, X₆ᵢ, X₇ᵢ, X₉ᵢ, X₁₃ᵢ, X₁₄ᵢ, X₁₇ᵢ, X₂₀ᵢ, X₂₄ᵢ, and X₂₆ᵢ are each individually selected from any amino acid;

[0559] X₁ᵢ is I, L, or V;

[0560] X₄ᵢ is A, D, F, H, I, L, M, N, Q, S, V, or Y;

[0561] X₈ᵢ is A, G, or S;

[0562] X₁₀ᵢ is D, E, I, K, N, Q, R, or S;

[0563] X₁₁ᵢ is E or Q;

[0564] X₁₅ᵢ is A or K;

[0565] X₁₆ᵢ is A, Q, R, or S;

[0566] X₁₈ᵢ is L, M, or R;

[0567] X₁₉ᵢ is I, L, Q, R, S, or V;

[0568] X₂₁ᵢ is A, D, E, G, H, I, Q. R, or S;

[0569] X₂₂ᵢ is A, K, N, Q, S, T, or V;

[0570] X₂₃ᵢ is A, H, K, R, W, or Y;

[0571] X₂₅ᵢ is A, G, H, I, K, Q, R, S, or T;

[0572] X₂₇ᵢ is C, H, I, K, L, R, or V

### Motif 10:

RX₂ⱼX₃ⱼX₄ⱼW, wherein:

[0573] X₂ⱼ is L, M, Q, or R;

[0574] X₃ⱼ is A, N, or S; and

[0575] X₄ⱼ is N, P, S, or T

### Motif 11:

X₁ₖX₂ₖX₃ₖX₄ₖX₅ₖX₆ₖX₇ₖX₈ₖF, wherein:

[0576] X₃ₖ and X₆ₖ are each individually selected from any amino acid;

[0577] X₁ₖ is I, L, or V;

[0578] X₂ₖ is A or V;

[0579] X₄ₖ is A, F, H, I, L, Q, W, or Y;

[0580] X₅ₖ is I, M, or V;

[0581] X₇ₖ is E, L, Q, or T:

[0582] X₈ₖ is A, I, or V

### Motif 12:

RX₂ₗX₃ₗX₄ₗX₅ₗX₆ₗX₇ₗX₈ₗX₉ₗX₁₀ₗX₁₁ₗX₁₂ₗX₁₃ₗ, wherein:

[0583] X₂ₗ is D, K, N, R, S, or V;

[0584] X₃ₗ is A, D, E, F, G, K, P, Q, or S;

[0585] X₄ₗ is A, E, I, K, L, S, T, or V;

[0586] X₅ₗ is any amino acid:

[0587] X₆ₗ is F, G, I, L, N, or V;

[0588] X₇ₗ is A, F, I, L, Q, R, V, or Y;

[0589] X₈ₗ is D, E, I, L, M, N, Q, S, T, or V;

[0590] X₉ₗ is D, E, F, I, L, M, Q, T, V, or Y;

[0591] X₁₀ₗ is I, K, L, R, or V;

[0592] X₁₁ₗ is D, E, K, N, Q, or R;

[0593] X₁₂ₗ is D, E, F, K, L, N, Q, W, or Y; and

[0594] X₁₃ₗ is F or L

### Motif 13:

X₁ₘX₂ₘX₃ₘX₄ₘX₅ₘX₆ₘX₇ₘX₈ₘX₉ₘX₁₀ₘX₁₁ₘX₁₂ₘX₁₃ₘX₁₄ₘX₁₅ₘX₁₆ₘX₁₇ₘX₁₈ₘX₁₉ₘX₂₀ₘX₂₁ₘX₂₂ₘX₂₃ₘX₂₄ₘ, wherein:

[0595] X₃ₘ, X₄ₘ, X₅ₘ, X₇ₘ, X₈ₘ, X₁₁ₘ, X₁₃ₘ, X₁₅ₘ, X₁₆ₘ, X₁₈ₘ, and X₂₂ₘ, are each individually selected from any amino acid,

[0596] X₁ₘ is A, E, F, I, L, M, N, Q, S, T, V, or Y;

[0597] X₂ₘ is A, F, G, I, L, M, R, S, T, or V;

[0598] X₆ₘ is A, D, E, F, G, H, L, M, N, S, or T;

[0599] X₉ₘ is D, M, N, or S;

[0600] X₁₀ₘ is D, E, or Q;

[0601] X₁₂ₘ is C, F, H, L, T, V, or Y;

[0602] X₁₄ₘ is A, E, K, L, R, or Y;

[0603] X₁₇ₘ is A, L, or S;

[0604] X₁₉ₘ is D, E, K, N, Q, R, or S;

[0605] X₂₀ₘ is G, I, M, Q, R, T, or V;

[0606] X₂₁ₘ is D, H, K, N, Q, or R;

[0607] X₂₃ₘ is A, G, I, L, N, S, T, or V;

[0608] X₂₄ₘ is F, H, I, K, L, M, N, Q, V, W, or Y

[0609] In some embodiments, the recombinase may comprise an amino acid sequence having at least 70% identity (e.g., at least 75%, at least 80%, at least 85%, at least 90%, at least 95%, at least 97%, at least 98%, at least 99%, or 100%) to any of amino acid motifs 1-13. The recombinase may also comprise enzymatically active fragments of the recited amino acid motifs (e.g., C- or N-terminal truncations or containing internal deletions, but retaining the desired enzymatic activity).

[0610] In some embodiments, the systems comprise a polypeptide comprising a recombinase having an amino acid sequence having at least 70% (e.g., at least 75%, at least 80%, at least 85%, at least 90%, at least 95%, at least 97%, at least 98%, at least 99%, or 100%) identity to any of SEQ ID NOs: 88-1183 (those listed in Tables 4 and 5). Also provided herein are enzymatically active fragments of SEQ ID NOs: 88-1183, from those sequences listed in Tables 4 and 5 (e.g., C- or N-terminal truncations or containing internal deletions, but retaining the desired enzymatic activity). The active fragment may contain at least 20 amino acids, at least 30 amino acids, at least 40 amino acids, at least 50 amino acids, at least 100 amino acids, or more of SEQ ID NOs: 88-1183 (Tables 4 and 5) or sequences at least 70% (e.g., at least 75%, at least 80%, at least 85%, at least 90%, at least 95%, at least 97%, at least 98%, at least 99%, or 100%) identity to at least 20 amino acids, at least 30 amino acids, at least 40 amino acids, at least 50 amino acids, at least 100 amino acids, or more of SEQ ID NOs: 88-1183 (Tables 4 and 5).

[0611] The term “recombinase,” as used herein, refers to a site-specific enzyme that mediates the recombination of DNA between recombinase recognition sequences, which results in the excision, integration, inversion, or exchange (e.g., translocation) of DNA fragments between the recombinase recognition sequences. In some embodiments, the recombinase is a large serine recombinase.

[0612] Large serine recombinases (LSRs) are site-specific recombinases that are commonly found on microbial mobile genetic elements and within phage genomes, allowing an invading phage to insert into the host genome and thus enter into their prophage state. The typical LSR is composed of distinct domains: an N-terminal “resolvase” domain that contains the active site; a “recombinase” domain that determines the DNA binding specificity of the enzyme; and a zinc beta ribbon domain and a coiled-coil motif implicated in additional binding specificity and irreversibility of forward integration reaction without excision cofactors. Based on detailed studies of the ΦC31 LSR, the following mechanism has been proposed: two LSR monomers bind to the donor attachment site and two bind to the acceptor attachment site—the four monomers come together to form a tetramer (FIG. 9). This complex then breaks both DNA strands and recombines them at the attachment sites to form a stably integrated final product.

[0613] The first polynucleotide may be a part of a bacterial plasmid, bacteriophage, plant virus, retrovirus. DNA virus, autonomously replicating extra chromosomal DNA element, linear plasmid, mitochondrial or other organellar DNA, chromosomal DNA, and the like. In some embodiments, the first polynucleotide comprises a human nucleic acid sequence. In some embodiments, the first polynucleotide is an exogenous or synthetic polynucleotide (e.g., a vector or engineered plasmid).

[0614] The first polynucleotide may comprise a donor recognition site for the recombinase. Recognition sites are specific polynucleotide sequences that are recognized by the recombinase enzymes described herein. The terms “attB” and “attP,” which refer to attachment (or recombination) sites originally from a bacterial target and a phage donor, respectively, are used herein although recombination sites for particular enzymes may have different names (e.g., “attD” and “attA”). The recombination sites typically include left and right arms separated by a core or spacer region.

[0615] In some embodiments, the first polynucleotide further comprises a cargo nucleic acid. The cargo nucleic acid may encode a gene product including but not limited to RNAs (e.g., non-coding RNA, such as tRNA, rRNA, micro RNA (miRNA), and small interfering RNA (siRNA), and coding RNA, such as messenger RNA (mRNA)) or proteins or polypeptides. The cargo nucleic acid may encode a transcription or translational control element (e.g., promoter elements, response elements (e.g., activator/repressor sequences)). In some embodiments, the cargo nucleic acid encodes a therapeutic protein. In some embodiments, the cargo nucleic acid encodes a therapeutic RNA.

[0616] The donor DNA, and by extension the cargo nucleic acid, may of any suitable length to facilitate recombination and delivery of the full cargo nucleic acid, including, for example, about 50-100 bp (base pairs), about 100-1000 bp, at least or about 10 bp, at least or about 20 bp, at least or about 25 bp, at least or about 30 bp, at least or about 35 bp, at least or about 40 bp, at least or about 45 bp, at least or about 50 bp, at least or about 55 bp, at least or about 60 bp, at least or about 65 bp, at least or about 70 bp, at least or about 75 bp, at least or about 80 bp, at least or about 85 bp, at least or about 90 bp, at least or about 95 bp, at least or about 100 bp, at least or about 200 bp, at least or about 300 bp, at least or about 400 bp, at least or about 500 bp, at least or about 600 bp, at least or about 700 bp, at least or about 800 bp, at least or about 900 bp, at least or about 1 kb (kilobase pair), at least or about 2 kb, at least or about 3 kb, at least or about 4 kb, at least or about 5 kb, at least or about 6 kb, at least or about 7 kb, at least or about 8 kb, at least or about 9 kb, at least or about 10 kb, or less than 10 kb, in length or greater. The donor DNA, and the cargo nucleic acid, may be at least or about 10 kb, at least or about 50 kb, at least or about 100 kb, between 20 kb and 60 kb, between 20 kb and 100 kb.

[0617] In essence, by contacting a set of corresponding recombination recognition sites with a corresponding recombinase, the recombinase mediates recombination between the sites. In some embodiments, the first polynucleotide further comprises a recipient recognition sequence for the recombinase.

[0618] In some embodiments, the system further comprises a second polynucleotide comprising a recipient recognition sequence for the recombinase. The second polynucleotide may be a part of a bacterial plasmid, bacteriophage, plant virus, retrovirus, DNA virus, autonomously replicating extra chromosomal DNA element, linear plasmid, mitochondrial or other organellar DNA, chromosomal DNA, and the like. In some embodiments, the second polynucleotide comprises a human nucleic acid sequence.

[0619] The type of recognition site will vary depending on the recombinase. In some embodiments, the recombinase is a landing-pad LSRs that can integrate efficiently at a pre-installed recognition site. Examples of landing-pad LSRs are shown in Table 1 along with their corresponding recombination attachment sites. In some embodiments, the recombinase is a multi-targeting LSRs that can integrate efficiently at many different loci in a target genome. Examples of a multi-targeting LSRs are shown in Table 3 along with their corresponding recombination attachment sites. In some embodiments, the recombinase is genome-targeting LSRs that can integrate at one or several target sites in a given target (e.g., target genome). Examples of genome-targeting LSRs are shown in Table 2 along with their corresponding recombination attachment sites. Attachment sites can be determined by mapping the edges of mobile genetic elements, as described herein.

[0620] In some embodiments, the donor recognition sequence, the recipient recognition sequence, or both are pseudo-recognition sequences or pseudosites. “Pseudo-recognition sequences” or “pseudosites” refer to a recognition sequences which is not necessarily that which is the native recognition sequence for a given recombinase but rather is sufficient to promote recombination. The pseudo-recognition sequence differs in one or more nucleotides from the corresponding native recombinase recognition sequence (e.g., due to insertions, deletions, or substitutions). In some embodiments, the pseudo-recognition sequence may be less than 50% identical to the native sequence. Pseudo-recognition sequences may also be those sequences present as an endogenous sequence in a genome that differs from the sequence of a genome where the wild-type recognition sequence for the recombinase resides. Identification of pseudo-recognition sequences can be accomplished, for example, by using sequence alignment and analysis, where the query sequence is the recognition sequence of interest, as described herein.

[0621] Depending upon the relative locations of the recombination attachment sites, any one of a number of events can occur as a result of the recombination. For example, if the recombination attachment sites are present on different nucleic acid molecules, the recombination can result in integration of one nucleic acid molecule into a second molecule.

[0622] The recombination attachment sites can also be present on the same nucleic acid molecule. In such cases, the resulting product typically depends upon the relative orientation of the attachment sites. For example, recombination between sites that are in the parallel or direct orientation will generally result in excision of any DNA that lies between the recombination attachment sites. In contrast, recombination between attachment sites that are in the reverse orientation can result in inversion of the intervening DNA.

[0623] The present disclosure also provides nucleic acids encoding the recombinases disclosed herein. The present disclosure further provides nucleic acids encoding the first polynucleotide and the second polynucleotide. The recombinase and the first polynucleotide may be encoded by the same or different nucleic acids (e.g., vectors). In some embodiments, a nucleic acid sequence encoding a recombinase is transiently or stable integrated into a cell, tissue, or organism so that the cell, tissue, or organism expresses the heterologous recombinase.

[0624] Nucleic acids of the present disclosure can comprise any of a number of promoters known to the art, wherein the promoter is constitutive, regulatable or inducible, cell type specific, tissue-specific, or species specific. In addition to the sequence sufficient to direct transcription, a promoter sequence of the invention can also include sequences of other regulatory elements that are involved in modulating transcription (e.g., enhancers, Kozak sequences and introns). Many promoter/regulatory sequences useful for driving constitutive expression of a gene are available in the art and include, but are not limited to, for example, CMV (cytomegalovirus promoter), EF1a (human elongation factor 1 alpha promoter), SV40 (simian vacuolating virus 40 promoter), PGK (mammalian phosphoglycerate kinase promoter), Ubc (human ubiquitin C promoter), human beta-actin promoter, rodent beta-actin promoter, CBh (chicken beta-actin promoter), CAG (hybrid promoter contains CMV enhancer, chicken beta actin promoter, and rabbit beta-globin splice acceptor), TRE (Tetracycline response element promoter), HI (human polymerase III RNA promoter), U6 (human U6 small nuclear promoter), and the like. Additional promoters that can be used for expression of the components of the present system, include, without limitation, cytomegalovirus (CMV) intermediate early promoter, a viral LTR such as the Rous sarcoma virus LTR, HIV-LTR, HTLV-1 LTR, Maloney murine leukemia virus (MMLV) LTR, myeoloproliferative sarcoma virus (MPSV) LTR, spleen focus-forming virus (SFFV) LTR, the simian virus 40 (SV40) early promoter, herpes simplex tk virus promoter, elongation factor 1-alpha (EF1-α) promoter with or without the EF1-α intron. Additional promoters include any constitutively active promoter. Alternatively, any regulatable promoter may be used, such that its expression can be modulated within a cell.

[0625] Moreover, inducible expression can be accomplished by placing the nucleic acid encoding such a molecule under the control of an inducible promoter/regulatory sequence. Promoters that are well known in the art can be induced in response to inducing agents such as metals, glucocorticoids, tetracycline, hormones, and the like, are also contemplated for use with the invention. Thus, it will be appreciated that the present disclosure includes the use of any promoter/regulatory sequence known in the art that is capable of driving expression of the desired protein operably linked thereto.

[0626] The present disclosure also provides for vectors containing the nucleic acids or system and cells containing the nucleic acids or vectors, thereof. Thus, the disclosure further provides for cells comprising the serine recombinases or systems, as disclosed herein.

[0627] The vectors may be used to propagate the nucleic acid in an appropriate cell and/or to allow expression from the nucleic acid (e.g., an expression vector). The person of ordinary skill in the art would be aware of the various vectors available for propagation and expression of a nucleic acid sequence.

[0628] To construct cells that express the present system described herein, expression vectors for stable or transient expression of the present system may be constructed via conventional methods and introduced into cells. For example, nucleic acids may be cloned into a suitable expression vector, such as a plasmid or a viral vector in operable linkage to a suitable promoter. The selection of expression vectors/plasmids/viral vectors should be suitable for integration and replication in eukaryotic cells.

[0629] In certain embodiments, vectors of the present disclosure can drive the expression of one or more sequences in mammalian cells using a mammalian expression vector. Examples of mammalian expression vectors include pCDM8 (Seed, Nature (1987) 329:840, incorporated herein by reference) and pMT2PC (Kaufman, et al., EMBO J. (1987) 6:187, incorporated herein by reference). When used in mammalian cells, the expression vector's control functions are typically provided by one or more regulatory elements. For example, commonly used promoters are derived from polyoma, adenovirus 2, cytomegalovirus, simian virus 40, and others disclosed herein and known in the art. For other suitable expression systems for both prokaryotic and eukaryotic cells see, e.g., Chapters 16 and 17 of Sambrook, et al., MOLECULAR CLONING: A LABORATORY MANUAL. 2nd eds., Cold Spring Harbor Laboratory, Cold Spring Harbor Laboratory Press, Cold Spring Harbor, N.Y., 1989, incorporated herein by reference.

[0630] The vectors of the present disclosure may direct the expression of the nucleic acid in a particular cell type (e.g., tissue-specific regulatory elements are used to express the nucleic acid). Such regulatory elements include promoters that may be tissue specific or cell specific. The term “tissue specific” as it applies to a promoter refers to a promoter that is capable of directing selective expression of a nucleotide sequence of interest to a specific type of tissue (e.g., seeds) in the relative absence of expression of the same nucleotide sequence of interest in a different type of tissue. The term “cell type specific” as applied to a promoter refers to a promoter that is capable of directing selective expression of a nucleotide sequence of interest in a specific type of cell in the relative absence of expression of the same nucleotide sequence of interest in a different type of cell within the same tissue. The term “cell type specific” when applied to a promoter also means a promoter capable of promoting selective expression of a nucleotide sequence of interest in a region within a single tissue. Cell type specificity of a promoter may be assessed using methods well known in the art, e.g., immunohistochemical staining.

[0631] Additionally, the vector may contain, for example, some or all of the following: a selectable marker gene for selection of stable or transient transfectants in host cells; transcription termination and RNA processing signals; 5′- and 3-untranslated regions; internal ribosome binding sites (IRESes), versatile multiple cloning sites; and reporter gene for assessing expression of the chimeric receptor. Suitable vectors and methods for producing vectors containing transgenes are well known and available in the art. Selectable markers include chloramphenicol resistance, tetracycline resistance, spectinomycin resistance, neomycin, streptomycin resistance, erythromycin resistance, rifampicin resistance, bleomycin resistance, thermally adapted kanamycin resistance, gentamycin resistance, hygromycin resistance, trimethoprim resistance, dihydrofolate reductase (DHFR), GPT; the URA3, HIS4, LEU2, and TRP1 genes of S. cerevisiae.

[0632] Conventional viral and non-viral based gene transfer methods can be used to introduce the nucleic acids into cells, tissues, or a subject. Such methods can be used to administer the nucleic acids to cells in culture, or in a host organism. Non-viral vector delivery systems include DNA plasmids, cosmids, RNA (e.g., a transcript of a vector described herein), a nucleic acid, and a nucleic acid complexed with a delivery vehicle.

[0633] The nucleic acids may be delivered by any suitable means. In certain embodiments, the nucleic acids or proteins thereof are delivered in vivo. In other embodiments, the nucleic acids or proteins thereof are delivered to isolated/cultured cells in vitro or ex vivo to provide modified cells useful for in vivo delivery to patients afflicted with a disease or condition.

[0634] Vectors according to the present disclosure can be transformed, transfected, or otherwise introduced into a wide variety of host cells. Transfection refers to the taking up of a vector by a cell whether or not any coding sequences are in fact expressed. Numerous methods of transfection are known to the ordinarily skilled artisan, for example, lipofectamine, calcium phosphate co-precipitation, electroporation, DEAE-dextran treatment, microinjection, viral infection, and other methods known in the art. Transduction refers to entry of a virus into the cell and expression (e.g., transcription and/or translation) of sequences delivered by the viral vector genome. In the case of a recombinant vector, “transduction” generally refers to entry of the recombinant viral vector into the cell and expression of a nucleic acid of interest delivered by the vector genome.

[0635] Methods of delivering vectors to cells are well known in the art and may include DNA or RNA electroporation, transfection reagents such as liposomes or nanoparticles to delivery DNA or RNA; delivery of DNA, RNA, or protein by mechanical deformation (see, e.g., Sharei et al. Proc. Natl. Acad. Sci. USA (2013) 110(6): 2082-2087, incorporated herein by reference. Nucleic acids can be delivered as part of a larger construct, such as a plasmid or viral vector, or directly, e.g., by electroporation, lipid vesicles, viral transporters, microinjection, and biolistics (high-speed particle bombardment).

[0636] Additionally, delivery vehicles such as nanoparticle- and lipid-based delivery systems can be used. Further examples of delivery vehicles include lentiviral vectors, ribonucleoprotein (RNP) complexes, lipid-based delivery system, gene gun, hydrodynamic, electroporation or nucleofection microinjection, and biolistics. Various gene delivery methods are discussed in detail by Nayerossadat et al. (Adv Biomed Res. 2012: 1: 27) and Ibraheem et al. (Int J Pharm. 2014 Jan. 1; 459(1-2):70-83), incorporated herein by reference.

[0637] As such, the disclosure provides an isolated cell comprising the vector(s) or nucleic acid(s) disclosed herein. Preferred cells are those that can be easily and reliably grown, have reasonably fast growth rates, have well characterized expression systems, and can be transformed or transfected easily and efficiently. Examples of suitable prokaryotic cells include, but are not limited to, cells from the genera Bacillus (such as Bacillus subtilis and Bacillus brevis), Escherichia (such as E. coli), Pseudomonas, Streptomyces, Salmonella, and Envinia. Suitable eukaryotic cells are known in the art and include, for example, yeast cells, insect cells, and mammalian cells. Examples of suitable yeast cells include those from the genera Kluyveromyces, Pichia, Rhino-sporidium, Saccharomyces, and Schizosaccharomyces. Exemplary insect cells include Sf-9 and HIS (Invitrogen, Carlsbad, Calif.) and are described in, for example, Kitts et al., Biotechniques, 14: 810-817 (1993); Lucklow, Curr. Opin. Biotechnol., 4: 564-572 (1993); and Lucklow et al., J. Virol., 67: 4566-4579 (1993), incorporated herein by reference. Desirably, the cell is a mammalian cell, and in some embodiments, the cell is a human cell. A number of suitable mammalian and human host cells are known in the art, and many are available from the American Type Culture Collection (ATCC, Manassas, Va.). Examples of suitable mammalian cells include, but are not limited to, Chinese hamster ovary cells (CHO) (ATCC No. CCL61), CHO DHFR-cells (Urlaub et al., Proc. Natl. Acad. Sci. USA, 97: 4216-4220 (1980)), human embryonic kidney (HEK) 293 or 293T cells (ATCC No. CRL1573), and 3T3 cells (ATCC No. CCL92). Other suitable mammalian cell lines are the monkey COS-1 (ATCC No. CRL1650) and COS-7 cell lines (ATCC No. CRL1651), as well as the CV-1 cell line (ATCC No. CCL70). Further exemplary mammalian host cells include primate, rodent, and human cell lines, including transformed cell lines. Normal diploid cells, cell strains derived from in vitro culture of primary tissue, as well as primary explants, are also suitable. Other suitable mammalian cell lines include, but are not limited to, mouse neuroblastoma N2A cells, HeLa, HEK, A549, HepG2, mouse L-929 cells, and BHK or HaK hamster cell lines.

[0638] Methods for selecting suitable mammalian cells and methods for transformation, culture, amplification, screening, and purification of cells are known in the art.

[0639] The present invention is also directed to compositions comprising a recombinase, a system, a nucleic acid, a vector, or a cell, as described herein.

[0640] Further disclosed herein are methods for identifying recombinases for use in the systems and methods disclosed herein. In some embodiments, the methods comprise: acquiring bacterial genome sequences; identifying putative recombinase genes in the bacterial genome sequences based on predicted recombinase domain; comparing genomes encoding the putative recombinase genes with those without the putative recombinase genes; mapping boundaries of a mobile genetic element comprising the putative recombinase genes: determine recombinase recognition sequences and/or attachment sites. In some embodiments, the predicted recombinase domain is a Pfam domain. In some embodiments, the method further comprises isolating mobile genetic elements from the bacterial genome sequences prior to identifying the putative recombinase genes. Mapping boundaries of a mobile genetic element may comprise determining 3′ and 5′ flanking sequences of the mobile genetic element termini and, if present, the duplication sites created upon insertion of the mobile genetic element.

### 3. METHODS OF ALTERING DNA

[0641] Applications of genetic engineering through alteration of DNA has yielded impactful results including CAR-T cell therapies, genetically modified crops, and cells producing diverse compounds and medicines. In many of these applications, genomic integration is highly preferred over plasmid-based methods for maintaining heterologous genes in engineered cells, due to improved stability in the genome, better control of copy numbers, and regulatory concerns regarding biocontainment of recombinant DNA. However, generation of modified cells with kilobases of changes across the genome remains practically challenging, often requiring inefficient, multi-step processes that are time and resource intensive. The systems and methods described herein allow integration of a large (e.g., kilobase or larger) exogenous donor polynucleotide into a DNA sequence. The methods may be used in vitro, ex vivo, or in vivo and allow alteration of a target DNA strand in solution, in a cell, in a tissue, or in a subject.

[0642] The disclosure provides a method of altering a target nucleic acid sequence. The phrases “altering a DNA sequence” or “altering a target DNA,” as used herein, refer to modifying at least one physical feature of a DNA sequence of interest. DNA alterations include, for example, single or double strand DNA breaks, deletion, or insertion of one or more nucleotides, and other modifications that affect the structural integrity or nucleotide sequence of the DNA sequence.

[0643] In some embodiments, the methods comprise contacting a target nucleic acid sequence with a system disclosed herein or with a polypeptide comprising a recombinase having an amino acid sequence having at least 70% (e.g., at least 75%, at least 80%, at least 85%, at least 90%, at least 95%, at least 97%, at least 98%, at least 99%, or 100%) identity to any of SEQ ID NOs: 1-74, an enzymatically active fragment thereof, or a nucleic acid encoding thereof.

[0644] In some embodiments, the recombinase has an amino acid sequence having at least 70% (e.g., at least 75%, at least 80%, at least 85%, at least 90%, at least 95%, at least 97%, at least 98%, at least 99%, or 100%) identity to any of SEQ ID NOs: 2, 6, 10, 12, 18, 19, 26, 29, 61, 65, or 66. In select embodiments, the recombinase has an amino acid sequence of SEQ ID NOs: 2, 6, 10, 12, 18, 19, 26, 29, 61, 65, or 66.

[0645] In some embodiments, the methods comprise contacting a target nucleic acid sequence with a system disclosed herein or with a polypeptide comprising a recombinase having an amino acid sequence having at least 70% (e.g., at least 75%, at least 80%, at least 85%, at least 90%, at least 95%, at least 97%, at least 98%, at least 99%, or 100%) identity to any of motifs 1-13 as disclosed above, an enzymatically active fragment thereof, or a nucleic acid encoding thereof.

[0646] In some embodiments, the systems comprise a polypeptide comprising a recombinase having an amino acid sequence having at least 70% (e.g., at least 75%, at least 80%, at least 85%, at least 90%, at least 95%, at least 97%, at least 98%, at least 99%, or 100%) identity to any of SEQ ID NOs: 88-1183, those listed in Tables 4 and 5. Also provided herein are enzymatically active fragments of SEQ ID NOs: 88-1183, those sequences listed in Tables 4 and 5 (e.g., C- or N-terminal truncations or containing internal deletions, but retaining the desired enzymatic activity). The active fragment may contain at least 20 amino acids, at least 30 amino acids, at least 40 amino acids, at least 50 amino acids, at least 100 amino acids, or more of SEQ ID NOs: 88-1183 (Tables 4 and 5) or sequences at least 70% (e.g., at least 75%, at least 80%, at least 85%, at least 90%, at least 95%, at least 97%, at least 98%, at least 99%, or 100%) identity to at least 20 amino acids, at least 30 amino acids, at least 40 amino acids, at least 50 amino acids, at least 100 amino acids, or more of SEQ ID NOs: 88-1183 (Tables 4 and 5).

[0647] In some embodiments, the target DNA comprises a donor recognition sequence, a recipient recognition sequence, or both.

[0648] In some embodiments, the methods further comprise contacting the target DNA with a first polynucleotide comprising a donor recognition sequence for the recombinase. In some embodiments, the first polynucleotide further comprises a cargo DNA sequence. In some embodiments, the donor recognition sequence, the recipient recognition sequence, or both are pseudo-recognition sequences.

[0649] The descriptions and embodiments provided above for the disclosed system, recombinase, first and second polynucleotide, donor and recipient recognition sequences, and cargo DNA sequence are applicable to the methods described herein.

[0650] In some embodiments, the methods may comprise introducing the disclosed systems or recombinase, or a nucleic acid encoding thereof, and a donor polynucleotide into a cell. In some embodiments, the recombinase, or the nucleic acid encoding thereof, is introduced into the cell before the introduction of the donor polynucleotide. In some embodiments, the recombinase, or the nucleic acid encoding thereof, is introduced into the cell after the introduction of the donor polynucleotide. In some embodiments, the recombinase, or the nucleic acid encoding thereof, and the donor polynucleotide may be introduced, in any order, with a time period separating each introduction.

[0651] In some embodiments, the recombinase is part of a system comprising a Cas protein, a reverse transcriptase, or active fragments or combinations thereof. In some embodiments, the recombinase is in a fusion protein with a Cas protein (e.g., Cas 9) and a reverse transcriptase, or active fragments thereof. For example, a Programmable Addition via Site-specific Targeting Elements (PASTE) system which integrates large cargos in a single delivery. See, Eleonora I. Ioannidi, et al., bioRxiv 2021.11.01.466786, incorporated herein by reference in its entirety.

[0652] In some embodiments, the recombinase, or the nucleic acid encoding thereof, is introduced into the cell concurrently with the introduction of the donor polynucleotide. For example, the recombinase, or the nucleic acid encoding thereof, and the donor polynucleotide are introduced simultaneously or nearly simultaneously.

[0653] The cell can be a mitotic and/or post-mitotic cell from any eukaryotic cell or organism (e.g. a cell of a single-cell eukaryotic organism, a plant cell, an algal cell, a fungal cell (e.g., a yeast cell), an animal cell, a cell from an invertebrate animal (e.g. fruit fly, cnidarian, echinoderm, nematode, an insect, an arachnid, etc.), a cell from a vertebrate animal (e.g., fish, amphibian, reptile, bird, mammal), a cell from a mammal, a cell from a rodent, a cell from a human, etc.), or a protozoan cell. Any type of cell may be of interest (e.g. a stem cell, e.g. an embryonic stem (ES) cell, an induced pluripotent stem (iPS) cell, a germ cell; a somatic cell, e.g. a fibroblast, a hematopoietic cell, a neuron, a muscle cell, a bone cell, a hepatocyte, a pancreatic cell, a liver cell, a lung cell, a skin cell; an in vitro or in vivo embryonic cell of an embryo at any stage, e.g., a 1-cell, 2-cell, 4-cell, 8-cell, etc. stage zebrafish embryo; etc.). Cells may be from established cell lines or they may be primary cells, where “primary cells,” “primary cell lines,” and “primary cultures” are used interchangeably herein to refer to cells and cells cultures that have been derived from a subject and allowed to grow in vitro for a limited number of passages.

[0654] In some embodiments, the one or more cells are animal cells. The present disclosure provides for a modified animal cell produced by the present system and method, an animal comprising the animal cell, a population of cells comprising the cell, tissues, and at least one organ of the animal. The present disclosure further encompasses the progeny, clones, cell lines or cells of the genetically modified animal. The present cells may be used for transplantation (e.g., hematopoietic stem cells or bone marrow).

[0655] Non-limiting examples of animal cells that may be genetically modified using the systems and methods include, but are not limited to, cells from: mammals such as primates (e.g., ape, chimpanzee, macaque), rodents (e.g., mouse, rabbit, rat), canine or dog, livestock (cow/bovine, donkey, sheep/ovine, goat or pig), fowl or poultry (e.g., chicken), and fish (e.g., zebra fish). The present methods and systems may be used for cells from other eukaryotic model organisms, e.g., Drosophila, C. elegans, etc. In certain embodiments, the mammal is a human, a non-human primate (e.g., marmoset, rhesus monkey, chimpanzee), a rodent (e.g., mouse, rat, gerbil, Guinea pig, hamster, cotton rat, naked mole rat), a rabbit, a livestock animal (e.g., goat, sheep, pig, cow, cattle, buffalo, horse, camelid), a pet mammal (e.g., dog, cat), a zoo mammal, a marsupial, an endangered mammal, and an outbred or a random bred population thereof.

[0656] In some embodiments, the one or more cells comprise plant cells. Suitable plant cells may be from a number of different plants including, but are not limited to, monocotyledonous and dicotyledonous plants, such as crops including grain crops (e.g., wheat, maize, rice, millet, barley), fruit crops (e.g., tomato, apple, pear, strawberry, orange), forage crops (e.g., alfalfa), root vegetable crops (e.g., carrot, potato, sugar beets, yam), leafy vegetable crops (e.g., lettuce, spinach); flowering plants (e.g., petunia, rose, chrysanthemum), conifers and pine trees (e.g., pine fir, spruce); plants used in phytoremediation (e.g., heavy metal accumulating plants); oil crops (e.g., sunflower, rapeseed) and plants used for experimental purposes (e.g., Arabidopsis). Thus, the disclosed methods and compositions have use over a broad range of plants, including, but not limited to, species from the genera Asparagus, Avena, Brassica, Citrus, Citrullus, Capsicum, Cucurbita, Daucus, Glycine, Hordeum, Lactuca, Lycopersicon, Malus, Manihot, Nicotiana, Oryza, Persea, Pisum, Pyrus, Prunus, Raphanus, Secale, Solanum, Sorghum, Triticum, Vitis, Vigna, and Zea.

[0657] In some embodiments, the one or more cells comprise microbial cells. In some embodiments, the microbial cells are Gram-negative bacterial cells, Gram-positive bacterial cells, or a combination thereof. In some embodiments, the microbial cells are pathogenic bacterial cells. In some embodiments, the microbial cells are non-pathogenic bacterial cells (e.g., probiotic and/or commensal bacterial cells). In some embodiments, the microbial cells form microbial flora (e.g., natural human microbial flora). In some embodiments, the microbial cells are used in industrial or environmental bioprocesses (e.g., bioremediation).

[0658] The cell can be a cancer cell. An appropriate cancer cell can be derived from a breast cancer, lung cancer, colon cancer, pancreatic cancer, renal cancer, stomach cancer, liver cancer, bone cancer, hematological cancer (e.g., leukemia or lymphoma), neural tissue cancer, melanoma, ovarian cancer, testicular cancer, prostate cancer, cervical cancer, vaginal cancer, or bladder cancer.

[0659] The systems and methods may be used to modify a stem cell. The term “stem cell” is used herein to refer to a cell that has the ability both to self-renew and to generate a differentiated cell type (see Morrison et al. (1997) Cell 88:287-298, incorporated herein by reference). Stem cells may be characterized by both the presence of specific markers (e.g., proteins, RNAs, etc.) and the absence of specific markers. Stem cells may also be identified by functional assays both in vitro and in vivo, particularly assays relating to the ability of stem cells to give rise to multiple differentiated progeny. Examples of stem cells include pluripotent, multipotent and unipotent stem cells. Examples of pluripotent stem cells include embryonic stem cells, embryonic germ cells, embryonic carcinoma cells and induced pluripotent stem cells (iPSCs). The cell may be an induced pluripotent stem cell (iPSC), e.g., derived from a fibroblast of a subject. In another embodiment, the cell can be a fibroblast. In some embodiments, the cell may be a cancer stem cell.

[0660] The present disclosure further provides progeny of a genetically modified cell, where the progeny can comprise the same genetic modification as the genetically modified cell from which it was derived. The present disclosure further provides a composition comprising a genetically modified cell. In some embodiments, a genetically modified host cell can generate a genetically modified organism. For example, the genetically modified host cell is a pluripotent stem cell, it can generate a genetically modified organism. Methods of producing genetically modified organisms are known in the art.

[0661] In some embodiments, the cell is in an organism or host, such that introducing the disclosed recombinases, systems, compositions, nucleic acids, or vectors into the cell comprises administration to a subject. The method may comprise providing or administering to the subject, in vivo, or by transplantation of ex vivo treated cells, a recombinase, nucleic acid, vector, composition, or system as described herein.

[0662] Cell replacement therapy can be used to prevent, correct, or treat a disease or condition, where the methods of the present disclosure are applied to isolated subject's cells (ex vivo), which is then followed by the administration of the genetically modified cells into the patient.

[0663] The cell may be autologous or allogeneic to the subject who is administered the cell. As described herein, the genetically modified cells may be autologous to the subject, e.g., the cells are obtained from the subject in need of the treatment, genetically engineered, and then administered to the same subject. Alternatively, the host cells are allogeneic cells, e.g., the cells are obtained from a first subject, genetically engineered, and administered to a second subject that is different from the first subject but of the same species. In some embodiments, the genetically modified cells are allogeneic cells and have been further genetically engineered to reduced graft-versus-host disease.

[0664] A “subject” may be human or non-human and may include, for example, animal strains or species used as “model systems” for research purposes, such a mouse model as described herein. Likewise, subject may include either adults or juveniles (e.g., children). Moreover, subject may mean any living organism, preferably a mammal (e.g., human or non-human) that may benefit from the administration of compositions contemplated herein. Examples of mammals include, but are not limited to, any member of the Mammalian class: humans, non-human primates such as chimpanzees, and other apes and monkey species; farm animals such as cattle, horses, sheep, goats, swine; domestic animals such as rabbits, dogs, and cats; laboratory animals including rodents, such as rats, mice and guinea pigs, and the like. Examples of non-mammals include, but are not limited to, birds, fish, and the like. In one embodiment of the methods and compositions provided herein, the mammal is a human.

[0665] The methods find use in inactivating a gene of interest or deleting a nucleic acid sequence. In some embodiments, the disclosed methods alter a target genomic DNA sequence in a host cell, tissue, or subject so as to modulate expression of the target DNA sequence, e.g., expression of the target DNA sequence is increased, decreased, or completely eliminated (e.g., via deletion of a gene or insertion or inversion of a promoter element). In some embodiments, the systems and methods described herein may be used to introduce an exogenous donor polynucleotide into a target DNA sequence.

[0666] In some embodiments, the target DNA encodes a gene product. The term “gene product,” as used herein, refers to any biochemical product resulting from expression of a gene. Gene products may be RNA or protein. RNA gene products include non-coding RNA, such as tRNA, rRNA, micro RNA (miRNA), and small interfering RNA (siRNA), and coding RNA, such as messenger RNA (mRNA). In some embodiments, the target genomic DNA sequence encodes a protein or polypeptide. However, the invention is not limited to editing of gene products. Any target DNA sequence may be edited, as desired. For example, in some embodiments, target DNA comprises non-coding DNA or comprises regions which are responsible for producing RNA. In some embodiments, the gene of interest is located chromosomally. In some embodiments, the gene of interest is located episomally, e.g., in bacterial cells.

[0667] Methods for inactivating a gene of interest comprise introducing into one or more cells the recombinases, systems, nucleic acids, or vectors described herein, wherein the target nucleic acid sequence comprises at least a portion of the gene of interest. The gene of interest may comprise any gene of interest to inactivate. In some embodiments, the gene of interest comprises an antibiotic resistance gene, a virulence gene, a metabolic gene, a toxin gene, a remodeling gene, a gene or gene variant responsible for a disease, or a mutant gene.

[0668] In select embodiments, the systems and methods described herein may be used to correct one or more defects or mutations in a gene (referred to as “gene correction”). In such cases, the cell or target sequence encodes a defective version of a gene, and the disclosed system further comprises a cargo nucleic acid molecule which encodes a wild-type or corrected version of the gene. Thus, in other words, the cell expresses a “disease-associated” gene. The term “disease-associated gene,” refers to any gene or polynucleotide whose gene products are expressed at an abnormal level or in an abnormal form in cells obtained from a disease-affected individual as compared with tissues or cells obtained from an individual not affected by the disease. A disease-associated gene may be expressed at an abnormally high level or at an abnormally low level, where the altered expression correlates with the occurrence and/or progression of the disease. A disease-associated gene also refers to a gene, the mutation or genetic variation of which is directly responsible or is in linkage disequilibrium with a gene(s) that is responsible for the etiology of a disease. Examples of genes responsible for such “single gene” or “monogenic” diseases include, but are not limited to, adenosine deaminase, α-1 antitrypsin, cystic fibrosis transmembrane conductance regulator (CFTR), β-hemoglobin (HBB), oculocutaneous albinism II (OCA2), Huntingtin (HTT), dystrophia myotonica-protein kinase (DMPK), low-density lipoprotein receptor (LDLR), apolipoprotein B (APOB), neurofibromin 1 (NF1), polycystic kidney disease 1 (PKD1), polycystic kidney disease 2 (PKD2), coagulation factor VIII (F8), dystrophin (DMD), phosphate-regulating endopeptidase homologue, X-linked (PHEX), methyl-CpG-binding protein 2 (MECP2), and ubiquitin-specific peptidase 9Y, Y-linked (USP9Y). Other single gene or monogenic diseases are known in the art and described in, e.g., Chial, H. Rare Genetic Disorders: Learning About Genetic Disease Through Gene Mapping, SNPs, and Microarray Data, Nature Education 1(1):192 (2008); Online Mendelian Inheritance in Man (OMIM); and the Human Gene Mutation Database (HGMD). In another embodiment, the target genomic DNA sequence can comprise a gene, the mutation of which contributes to a particular disease in combination with mutations in other genes. Diseases caused by the contribution of multiple genes which lack simple (i.e., Mendelian) inheritance patterns are referred to in the art as a “multifactorial” or “polygenic” disease. Examples of multifactorial or polygenic diseases include, but are not limited to, asthma, diabetes, epilepsy, hypertension, bipolar disorder, and schizophrenia. Certain developmental abnormalities also can be inherited in a multifactorial or polygenic pattern and include, for example, cleft lip/palate, congenital heart defects, and neural tube defects.

### 4. KITS

[0669] Also within the scope of the present disclosure are kits including a recombinase, or nucleic acid encoding thereof, a donor or first polynucleotide, a composition, or system as described herein, or a cell comprising a system as described herein or a recombinase as described herein.

[0670] The kits can also comprise instructions for using the components of the kit. The instructions are relevant materials or methodologies pertaining to the kit. The materials may include any combination of the following: background information, list of components, brief or detailed protocols for using the compositions, trouble-shooting, references, technical support, and any other related documents. Instructions can be supplied with the kit or as a separate member component, either as a paper form or an electronic form which may be supplied on computer readable memory device or downloaded from an internet website, or as recorded presentation.

[0671] It is understood that the disclosed kits can be employed in connection with the disclosed methods. The kit may include instructions for use in any of the methods described herein. The instructions can comprise a description of use of the components for the methods of identifying recombinases or methods of altering DNA.

[0672] The kits provided herein are in suitable packaging. Suitable packaging includes, but is not limited to, vials, bottles, jars, flexible packaging, and the like.

[0673] Kits optionally may provide additional components such as buffers and interpretive information. Normally, the kit comprises a container and a label or package insert(s) on or associated with the container. In some embodiment, the disclosure provides articles of manufacture comprising contents of the kits described above.

[0674] The kit may further comprise a device for holding or administering the present recombinase, nucleic acids, system, or composition. The device may include an infusion device, an intravenous solution bag, a hypodermic needle, a vial, and/or a syringe.

[0675] The present disclosure also provides for kits for performing the methods or producing the components in vitro. The kit may include the components of the present system. Optional components of the kit include one or more of the following: (1) buffer constituents. (2) control plasmid, (3) transfection or transduction reagents.

### 5. EXAMPLES

[0676] Cell lines and cell culture. K562 (ATCC CCL-243) cells were cultured in a controlled humidified incubator at 37° C. and 5% CO₂, in RPMI 1640 (Gibco) media supplemented with 10% FBS (Hyclone), penicillin (10,000 I.U./mL), streptomycin (10,000 μg/mL), and L-glutamine (2 mM). HEK-293T cells, as well as HEK-293FT and HEK-293T-LentiX cells used to produce lentivirus, as described below, were grown in DMEM (Gibco) media supplemented with 10% FBS (Hyclone), penicillin (10,000 I.U./mL), and streptomycin (10,000 μg/mL).

[0677] Selecting large serine recombinases (LSRs) for initial pilot experiments. LSRs for the pilot experiments were identified by searching for the Recombinase Pfam domain among the mobile genetic elements (MGEs) previously identified (See Durrant et al. (2020) Cell Host & Microbe 28(5): 767 and El-Gebali et al., Nucleic Acids Res. 47, D427-D432 (2019), incorporated herein by reference in their entirety). The identity of the attachment site was inferred from the boundaries of the MGE that contained each LSR. For example, if a sequence had the following structure:

B₁-D-P₁-E-P₂-D-B₂

where B₁ indicates the sequence flanking the MGE insertion on the 5′ end, D indicates the target site duplication created upon insertion (if it exists), P₁ indicates the sequence flanking the 5′ integration boundary that is included in the MGE, E is the intervening MGE, P₂ indicates the sequence flanking the 3′ integration boundary that is included in the MGE, and B2 indicates the sequence flanking the MGE insertion on the 3′ end, then the attB and attP sequences can be reconstructed as:

attB=B₁+D+B₂

attP=P₂+D+P₁

where the “+” operator in this case indicates nucleotide sequence concatenation.

[0678] Candidates were then annotated to determine features such as: 1) whether or not the element was predicted to be a phage element, 2) how many isolates contain the integrated MGE, and 3) how often MGEs containing distinct LSRs will integrate at the same location in the genome. Candidates were then given higher priority if they were contained within predicted phage elements, if they appeared in multiple isolates, and if the attachment sites were targeted by multiple distinct LSRs.

[0679] Computational workflow to identify thousands of LSRs and cognate attachment sites. The LSR-identification workflow was implemented as described schematically in FIG. 9. 146,028 bacterial isolate genomes available in the NCBI RefSeq database were identified. Genomes were then clustered at the species level using the NCBI taxon ID and the TaxonKit tool. Genomes within each species were randomized and batched into sets of 50 and 20 genomes, where the first batch included 50 genomes and all subsequent batches contained 20 genomes. Each batch was then processed by downloading all relevant genomes from NCBI, annotating coding sequences in each genome with Prodigal, and then searching for all encoded proteins that contained a predicted Recombinase Pfam domain using HMMER (El-Gebali et al., 2019; HMMER, n.d.). Genomes that contained a predicted LSR were then compared to genomes that lacked that same LSR using the MGEfinder command wholegenome, which was developed by adapting the default MGEfinder to work with draft genomes. If MGE boundaries that contained the LSR were identified, all of the relevant sequence data was saved and stored in a database. The workflow was parallelized using Google Cloud virtual machines.

[0680] After this initial round of LSR mining was complete, a modified approach was taken to further expand the database and avoid redundant searches. First, bacterial species with a high number of isolate genomes available in the first round of LSR mining were analyzed to determine if further mining of these genomes would be necessary. Rarefaction curves representing the number of new LSR families identified with each additional genome analyzed were estimated for these common species, and species that appeared saturated (e.g., less than 1 new cluster per 1000 genomes analyzed) were considered “complete,” meaning no further genomes belonging to this species would be analyzed. Next, 48,557 genomes that met these filtering criteria were downloaded from the GenBank database and prepared for further analysis. The analysis was very similar to round 1, but with some notable differences. First, a database of over 496,133 isolate genomes from the RefSeq and GenBank genomes was constructed. PhyloPhlAn marker genes were then extracted from all of these genomes. Next, for each genome that was found to contain a given LSR, closely related isolates found in the database were selected according to marker gene homology were then selected for the comparative genomics analysis and further LSR discovery. This marker gene search approach was made available in a public github repository (github(dot)com(backslash)bhattlab(backslash)GenomeSearch). This second round of LSR and attachment site mining increased the total number of candidates by approximately 32%.

[0681] Predicting LSR target site specificity. LSR protein sequences were clustered at 90% and 50% identity using MMseqs2. Protein sequences that overlapped with predicted attachment sites were extracted from their genome of origin and clustered with all other target proteins at 50% identity using MMseqs2. LSR-attachment site combinations that were found to meet intermediate quality control filters were considered. To identify site-specific LSRs, only LSRs clustered at 50% identity and target proteins clustered at 50% identity were considered. Next, LSR-target pairs were filtered to only include target protein clusters that were targeted by 3 or more LSR clusters. Next, only LSR clusters that targeted a single target protein cluster were considered. The remaining sets of LSR clusters were considered to be single-targeting, meaning that they likely site-specifically targeted only one protein cluster. Multi-targeting, or transposable LSRs with minimal site-specificity, were identified. Only LSRs clustered at 90% identity and target proteins clustered at 50% identity were considered. Next, the total number of target protein clusters that were targeted by each LSR cluster were counted, and LSR clusters that targeted only one protein cluster were removed from consideration. Next, the remaining LSRs were binned according to the number of protein clusters that they targeted, where “2” indicates two target proteins, “3” indicates three target proteins, and “>3” indicates more than three target proteins. As referred to herein, “2” and “3” are considered moderately multi-targeting, while “>3” are considered fully multi-targeting. Each 50% identity cluster was then assigned to a multi-targeting bin according to the highest bin attained by any one 90% cluster found within the 50% identity cluster.

[0682] Phylogenetic analysis of site-specific integrases targeting a conserved attachment site. One example of several site-specific integrases targeting a conserved attachment site is shown in FIG. 1E. All attB attachment sites were clustered at 80% identity using MMseqs2. Candidates were filtered to include only those that met QC thresholds, and then attB sites that were ranked by the number of LSR clusters that were found to target them. An example attB cluster was chosen for further analysis. All LSRs that targeted this attB cluster were extracted from the database, and were aligned using the MAFFT-LINSI algorithm. Amino acid identity distances between all LSRs were calculated, and the distance matrix was used to create a hierarchical tree in R. LSRs that were 99% identical at the amino acid level or more were collapsed into a single cluster. This hierarchical tree was visualized and shown in FIG. 1E, along with all attB sites that were targeted by the LSRs.

[0683] Identifying target site motifs from attachment sites in the LSR database. Multi-targeting LSRs in the database were analyzed at the level of individual proteins, at the level of 90% amino acid identity clusters, and at the level of 50% amino acid identity clusters. For each of these levels, only candidates that were found to target more than 10 unique attB sequences or 10 target genes clustered at 50% amino acid identity were kept. Then all of the corresponding attB sequences were extracted, with only one attachment site per target gene cluster being extracted to avoid redundancy. These attB sequences were then initially aligned using MAFFT-LINSI. Next, possible core dinucleotides were identified in each alignment by extracting all dinucleotides in the alignment, and ranking them by the conservation of their most frequent nucleotides and their proximity to the center of the attB sequences, using a custom score that equally weighted high nucleotide conservation and normalized distance to the attB center. Candidates were then re-aligned only with respect to these predicted dinucleotide cores, rather than using an alignment algorithm such as MAFFT. These alignments were then visualized in using ggseqlogo to identify conserved target site motifs.

[0684] Quality controls and selection criteria for LSRs. LSRs with large attachment site cores, above 20 base pairs in length, were removed. The attachment site core is the portion of the attB and the attP that are predicted to be perfectly homologous. LSRs with attachment sites with more than 5% of their nucleotides being ambiguous in the original genome assemblies were removed. Only LSRs between 400 amino acids and 650 amino acids were kept. Next, only predicted LSRs that contained at least one of the three main LSR Pfam domains were retained (Resolvase. Recombinase, and Zn_ribbon_recom). Next, LSRs were removed from consideration if their sequences contained more than 5% ambiguous amino acids. Only LSRs that were found on integrative mobile genetic elements that were less than 200 kilobases in length were retained. And finally, only LSRs that were within 500 nucleotides of their predicted attachment sites were retained. Candidates that met all of these filters were considered to meet quality-control thresholds.

[0685] Plasmid recombination assay to validate LSR-attD-attA predictions. Three plasmids were designed for each LSR candidate. The effector plasmid contained the EF1a promoter, followed by the recombinase coding sequence (codon optimized for human cells), a 2A self-cleaving peptide, and an eGFP coding sequence. The attA plasmid contained an EF1a promoter, followed by the attA sequence, followed by mTagBFP2 coding sequence, which should constitutively express the mTagBFP2 protein in human cells. The attD plasmid included only the attD sequence followed by the mCherry coding sequence, which should produce no fluorescent mCherry prior to integration. HEK-293T cells were plated into 96 well plates and transfected one day later with 200 ng of effector plasmid, 70 ng of attA plasmid, and 50 ng of attD plasmid using Lipofectamine 2000 (Invitrogen). 2-3 days after transfection of cells with all three plasmids, cells were then measured using flow cytometry on an Attune NxT Flow Cytometer (ThermoFisher). HEK-293T cells were lifted from the plate using TrypLE (Gibco), and resuspended in Stain Buffer (BD). These experiments were conducted in triplicate transfections. Cells were gated for single cells using forward and side scatter, and then on cells expressing fluorescent eGFP. Next, mTagBFP2 fluorescence was measured to indicate the amount of un-recombined attD plasmids, and mCherry fluorescence was measured to indicate the amount of recombinant plasmid.

[0686] An experiment testing recombinases with matched and unmatched attD plasmids was performed similarly, following the above protocol for K562 cells. 3 days after transfection, cells were measured by flow cytometry on a BD Accuri C6 cytometer.

[0687] Landing pad cell line production. Landing pad LSR candidates were cloned into lentiviral plasmids under the expression of the strong pEF1a promoter, with their attB site in between the promoter and start codon, and with a 2A-EGFP fluorescent marker downstream the LSR coding sequence. Lentivirus production and spinfection of K562 cells were performed as follows: HEK-293T cells were plated on 6-well tissue culture plates. On each plate, 5×10⁵ HEK-293T cells were plated in 2 mL of DMEM, grown overnight, and then transfected with 0.75 μg of an equimolar mixture of the three third-generation packaging plasmids (pMD2.G, psPAX2, pMDLg/pRRE) and 0.75 μg of LSR vectors using 10 μl of polyethyleneimine (PEI, Polysciences #23966) and 200 μl of cold serum free DMEM. pMD2.G (Addgene plasmid #12259: RRID:Addgene_12259), psPAX2 (Addgene plasmid #12260; RRID:Addgene_12260), and pMDLg/pRRE (Addgene plasmid #12251; RRID:Addgene_12251). After 24 hours, 3 mL of DMEM was added to the cells, and after 72 hours of incubation, lentivirus was harvested. The pooled lentivirus was filtered through a 0.45-μm PVDF filter (Millipore) to remove any cellular debris. 1×10⁵ K562 cells were infected with the lentiviruses by spinfection for 2 hours at 1000×g at 33° C. Lentivirus doses of 50, 100, and 200 μl were used for each vector, in order to find a condition with low multiplicity of infection wherein each transduced cell would be likely to contain only a single integrated copy of the landing pad. Infected cells grew for 3 days and then infection efficiency was measured using flow cytometry to measure EGFP (BD Accuri C6); the dose that gave rise to 5-15% EGFP+cells was selected for each LSR for further experiments. Ten days later, these EGFP+cells were sorted into a 96-well plate with a single cell in each well, in order to derive clonal lines with a single landing pad location. Two weeks later, 4 clones for each LSR with a unimodal high EGFP expression level were selected for expansion and subsequent experiments.

[0688] Landing pad integration efficiency assay. Clonal landing pad lines were electroporated with the promoterless mCherry donor containing the matching attP at a dose of either 1000 or 2000 ng donor plasmid. At timepoints from 3-11 days post-electroporation, the cells were subjected to flow cytometry to measure mCherry (BD Accuri C6).

[0689] Pseudosite integration efficiency assay to measure integration percent into the WT genome. To determine the percentage of integration of attD donors into pseudosites in the human genome, attD sequences were cloned into a plasmid containing an Ef1a promoter followed by mCherry, and p2a self-cleaving peptide, and a puromycin resistance marker. 1.0×10⁶ K562 cells were electroporated in Amaxa solution (Lonza Nucleofector SF, program FF-120), with 3000 ng LSR plasmid and 2000 ng pseudosite attD plasmid. As a non-matching LSR control, 3000 ng of Bxb1 was substituted for the correct LSR plasmid. The cells were cultured between 2×10⁵ cells/mL and 1×10⁶ cells/mL for 2-3 weeks. 100 uL of each sample was run on the Attune NxT Flow Cytometer every 3-4 days to measure the mCherry signal. After 2-3 weeks, transiently transfected plasmid was nearly fully diluted out in the non-matching LSR control, and the efficiency of the LSR was determined by the difference in mCherry percentage between the non-matching LSR control and the experimental condition.

[0690] Integration site mapping assay to determine human genome integration specificity. Utilizing the same protocol as above, K562s were electroporated with LSR and pseudosite attD plasmids. After 5 days in culture, puromycin was added to the media at 1 ug/mL. The cells were cultured for 1.5 more weeks, and then the gDNA was harvested using the Quick-DNA Miniprep Kit (Zymo) and quantified by Qubit HS dsDNA Assay (Thermo). A modified version of the UDiTaS sequencing assay was used as described in Giannoukos et al. BMC Genomics 19, 212 (2018), and Danner, 2020 Protocols.io.(doi(dot)org(backslash)10.17504(backslash)protocols.io.7k2hkye). Tn5 was purified and stored at 7.5 mg/mL. Adaptors were assembled by combining 50 uL of 100 uM top and bottom strand, heating to 95° C. for 2 minutes, and slowly ramping down to 25° C. over 12 hours. Next, the transposome was assembled by combining 85.7 uL of Tn5 transposase with 14.3 uL pre-annealed oligos, and incubated for 60 minutes at room temperature. Tagmentation was performed by adding 150 ng gDNA, 4 μL of 5×TAPS-DMF (50 mM TAPS NaOH, 25 mM MgCl2, 50% v/v DMF (pH 8.5) at 25° C.), 3 uL assembled transposome, and water for a 20 uL final reaction volume. The reaction was incubated at 55° C. for 10-15 minutes and then purified with Zymo DNA Clean and Concentrator-5. The tagmented products were run on Agilent Bioanalyzer HS DNA kit to confirm average fragment size of ˜2 kb. Next, PCR was performed with the outer primers for 12 cycles using 12.5 uL Platinum Superfi PCR Master Mix (Thermo), 1.5 uL of 0.5M TMAC, 0.5 uL of 10 uM outer nest GSP primer, 0.25 uL of 10 uM outer i5 primer, 9 ul of tagmented DNA, and 1.25 uL of DMSO. After Ampure XP 0.9× bead clean-up, a second PCR with the inner next primers, was performed for 18 cycles. The PCR contained 25 uL Platinum Superfi Master Mix (Thermo), 3 uL 0.5M TMAC, 2.5 uL DMSO, 2.5 uL of 10 uM i5 primer, 5 μL of 10 uM i7 GSP primer, 10 uL of the purified 1 st round PCR product, and 2 uL water for a final reaction volume of 50 μL. The final library was size selected on a 2% agarose gel for fragments between 300-800 bases, gel extracted with the Monarch DNA Gel Extraction Kit (NEB), quantified with Qubit HS dsDNA Assay (Thermo) and KAPA Library Quantification Kit, fragment analyzed with Agilent Bioanalyzer HS DNA kit, and sequenced on a MiSeq (Illumina).

[0691] Computational analysis of integration site mapping sequence assay. Snakemake workflows were constructed and used to analyze NGS data for the UDiTaS pseudosite sequencing assay. First, stagger sequences (filler sequences added for better discrimination of samples during sequencing) were added to primers were removed using custom python scripts. Next, fastp was used to trim nextera adaptors from reads and to remove reads with low PHRED scores. Next, reads were aligned to both the human genome (GRCh38) and a donor plasmid sequence containing the LSR-specific attD sequence in single-end mode using BWA. Reads were analyzed individually using custom python scripts to identify 1) if they aligned to the donor plasmid, human genome, or both, 2) whether or not the reads began at the predicted primer, and 3) whether or not the pre-integration attachment site was intact. Reads were then filtered to only include those reads that mapped to both the donor plasmid and the human genome, those that began at the primer site, and those that did not have an intact attD sequence (if this could be determined from the length of a particular read). This filtered read set was then aligned in paired-end mode to the human genome using default settings in BWA MEM. Alignments with a mapping quality score less than 30 were removed, along with supplementary alignments and paired read alignments with an insert size longer than 1500 bp. The samtools markdup tool was used to remove potential PCR duplicates and identify unique reads for downstream analysis. Next, MGEfinder was used to extract clipped end sequences from reads aligned to the human genome and generate a consensus sequence of the clipped ends, which represent the crossover from the human genome into the integrated attD sequence. Using custom python scripts, k-mers of length 9 base pairs were extracted from these consensus sequences and compared with a subsequence of the attD plasmid extending from the original primer to 25 bp after the end of the attD attachment site. If there were no shared 9-mers, the candidate was discarded. Otherwise, consensus sequences were clipped to begin at the primer site, and these consensus sequences were then aligned back to the original attD subsequence using the biopython local alignment tool. Two aligned portions were extracted—the full local alignment of the consensus sequence to the attD (called the “full local alignment”), and the longest subset of the alignment that included no ambiguous bases and no gaps (called the “contiguous alignment”). To filter a final set of true insertion sites, only sites with at least 80% nucleotide identity shared between the consensus sequence and the attD subsequence in either the full local alignment or the contiguous alignment were kept. Finally, only sites with a crossover point within 15 base pairs of the predicted dinucleotide core were kept.

[0692] This approach could precisely predict integration sites, but errors in sequencing reads led to some variability in this prediction. To account for this, integration sites were combined into integration “loci” by merging all sites that were within 500 base pairs of each other, using bedtools. This approach would merge integration events that occurred at the same site but in opposite orientations, for example. When pooling reads across biological or technical replicates, these loci were also merged if they overlapped. When measuring the relative frequency of insertion across different loci, all uniquely aligned reads (deduplicated using samtools markdup) found within each locus were counted. These were then converted into percentages for each locus by dividing by the total number of unique reads aligned to all integration loci.

[0693] Target site motifs for different LSRs could be determined from precise predictions of dinucleotide cores for all integration sites. For each integration locus, only one integration site was chosen if there were multiple, and integration sites with more reads supporting them were prioritized. Up to 30 base pairs of human genome sequence around the predicted dinucleotide core were extracted using bedtools, choosing the forward or reverse strand depending on the orientation of the integration. All such target sites, or a subset of these target sites if desired, were then analyzed for conservation at each nucleotide position using the ggseqlogo package in R.

[0694] Phylogenetic tree construction. Representative amino acid sequences of each quality-controlled 50% identity LSR cluster were used to construct the phylogenetic tree. LSRs were aligned using MAFFT in G-INS-i mode, and IQ-TREE was then used to generate a consensus tree using 1000 bootstrap replicates and automatic model selection.

### Example 1

### Systematic Identification of Recombinases and Predicted Attachment Sites Revealed Site-Specific and Multi-Targeting/Transposable Clades

[0695] LSRs such as Bxb1 and PhiC31 catalyze an integration reaction that recombines two DNA sequences at specific attachment sites, referred to as attP (the DNA sequence found in the phage) and attB (the DNA sequence found in the bacteria). Using a comparative genomics approach built to identify precise boundaries of integrative elements (FIG. 1A), thousands of LSRs were identified in public databases of clinical and environmental bacterial isolate genomes. Once LSRs were identified, closely related genomes (average nucleotide identity (ANI)>95%) that lacked a given LSR were searched for, and used the previously developed bioinformatics tool MGEfinder (Durrant et al. (2020) Cell Host & Microbe 28(5): 767, incorporated herein by reference in its entirety) was used to align whole genomes with and without LSRs, thus allowing identification of the integrated prophage or mobile genetic element sequences (FIG. 1A). The boundaries of these predicted sequences represent the attL and attR sites that form when attP recombines with attB (FIG. 1A, box), and flank the integrated prophage genome or mobile genetic element containing the LSR. By using this approach on 194,585 bacterial isolate genomes, 12,638 candidate LSRs were identified and their original attP and attB attachment sites were reconstructed. After applying various quality control filters, and clustering protein sequences at 50% identity, the final dataset of LSR-attachment site predictions included 1,081 LSR clusters recovered from genomes belonging to 20 host phyla (FIG. 5A), indicating good representation of published bacterial assemblies.

[0696] To predict the site-specificity of candidate LSRs using only the constructed database, the network of LSRs and associated attachment sites were inspected, and LSRs from a diverse set of 20 host phyla were recovered (FIG. 5A), indicating good representation of published bacterial assemblies. Integration patterns across LSR clusters were compared. If many distantly-related LSRs appeared to target similar integration sites, it is likely that these LSRs would be site-specific. Conversely, if LSR clusters targeted many distinct integration sites, then they would be “multi-targeting,” meaning that they either had relaxed sequence specificity or they evolved to target sequences that occurred at multiple different sites in their host organisms. Target similarity was measured by mapping the attB integration sites to nearby ORF predictions, allowing attB sites to be grouped by the ORF sequence, referred to as a “target gene.” The protein sequences of these target genes were then clustered at 50% amino acid identity to further group more distantly related integration sites together. Clustering by target gene rather than attB sequence alone facilitated use of protein homology rather than DNA homology, grouping more distantly related target sites.

[0697] For each LSR cluster, the number of associated target gene clusters were estimated and visualized on the phylogenetic tree of representatives of each LSR cluster at the amino acid level. LSRs were binned into two groups: “Site-specific integrases” or “Multi-targeting integrases” (FIG. 1B). 82.8-88.3% of LSR clusters were predicted to be site-specific, or to have intermediate site-specificity, where the total number of unique target genes is 1, 2, or 3, depending on strictness of criteria used. One clade emerged of many multi-targeting LSRs, or those predicted to have to integrate into more than 3 target protein families, suggesting that this was an evolved strategy inherited from a single ancestor. This clade correlated strongly with DUF4368, a Pfam domain of unknown function (FIG. 5A), and that it includes previously characterized LSRs in the Tnd-like transposase subfamily (H. Wang and Mullany 2000 Journal of Bacteriology 182 (23): 6577-83; Adams et al. 2004 Molecular Microbiology 53 (4): 1195-1207, each incorporated herein by reference in its entirety).

[0698] Many examples of distantly related LSRs targeted the same gene clusters (FIGS. 1D and 1E). In FIG. 1D, an example of a network of diverse LSR clusters that primarily target a single gene cluster, a gene with homologs annotated as an ATP-dependent protease/Mg(2+) chelatase family protein/ComM-like protein, containing predicted Pfam domains ChlI (Subunit ChlI of Mg-chelatase), Mg_chelatase (Magnesium chelatase, subunit ChlI), and Mg_chelatase_C (Magnesium chelatase, subunit ChlI C-terminal) is shown. Homologs of this particular gene are one of the most commonly targeted genes (FIG. 5E), being targeted by 12.4% of all predicted site-specific integrases (FIG. 5B). FIG. 1E shows an example of a diverse set of LSRs that were found to target a single conserved site, the CDS sequence of a Prolyl isomerase. Upon aligning the LSR candidates that targeted this site, the DNA-binding Resolvase, Recombinase, and Zn_ribbon_recom domains were found to be much more conserved than the C-terminus, which is not believed to play an important role in DNA-binding (FIG. 5C). A more comprehensive enrichment in DNA competence genes and no enrichment within or near anti-phage defense genes (FIGS. 5E-5G)

[0699] FIG. 1G shows an example network of a multi-targeting LSR. Several multi-targeting LSRs have large numbers of associated attB target sites, which allowed inference of their sequence specificity computationally from the database. As shown in FIG. 1H, a single multi-targeting integrase was found to integrate into 21 distinct sites. Aligning target sites revealed a conserved TT dinucleotide core, with 5′ and 3′ ends enriched for T and A nucleotides, respectively. This suggested that this particular example most likely has relaxed sequence specificity overall, with the TT central dinucleotide being the most important feature for integration. Other examples of multi-targeting LSRs with distinct target site motifs are shown in FIG. 5D, including several with more complex motifs than the AT-rich one shown in FIG. 1H.

### Example 2

### Characterization of Landing Pad LSRs

[0700] One valuable application for LSRs in biotechnology is specific delivery of genetic cargo to an introduced site or so-called ‘landing pad’ that is not present elsewhere in the target genome. An ideal landing pad LSR is highly specific for an attB that does not exist in a target genome, but can efficiently integrate once the attB is installed.

[0701] Using previously identified MGEs for LSRs (Durrant et al. (2020) Cell Host & Microbe 28(5): 767, incorporated herein by reference in its entirety), a set of 17 LSR candidates with evidence for site-specificity was curated as an initial proof of concept. To validate that these recombinases were active in mammalian cells, an inter-plasmid recombination assay was developed in HEK293FT cell by synthesizing three plasmids: one for expression of the human codon-optimized LSRs, and separate plasmids containing their putative attP and attB sequences (FIG. 2A). In this plasmid recombination assay, the attP plasmid contains a promoterless mCherry, which gains a promoter upon recombination with the attB plasmid resulting in fluorescent protein expression that can be read by flow cytometry. In the initial set of 17 candidates, 15 candidates were identified with greater mCherry+MFI values than attD-only controls (one-tailed t-test, P<0.05), demonstrating functional recombination (FIGS. 2B, 2C, and 6L). In comparison to positive controls, 13 candidates had greater mCherry+MFI than PhiC31, and 3 had greater mCherry+MFI than Bxb1. For a subset of LSRs, attachment site orthogonality was tested using the assay with different attachment site combinations, and it was found that they are highly specific and orthogonal to each other (FIG. 2D).

[0702] Integration into attB-containing landing pads that were pre-installed in the human genome were also tested (FIG. 2F). A construct containing an Ef1a promoter, attB, the matching LSR and GFP were integrated into the genome of K562 cells via high MOI lentivirus, resulting in a polyclonal population of cells likely to have the landing pad in different chromosomal locations in each cell. Upon successful integration of the promoterless mCherry donor into the landing pad, mCherry is expressed while GFP is knocked out. Using this landing pad assay, 5 of the new LSRs were found to integrate into human genome with measurable efficiency and Ec04, Ec07, Kp03, and Pa01 were significantly more efficient than BxB1 (FIGS. 6A and 2L). The stability of these polyclonal landing pads expressing LSR-GFP was assessed by flow cytometry over time and for some landing pads such as Ec07 and Ec03, the majority of cells lost GFP expression, suggesting the landing pad was transcriptionally silenced or genetically unstable (FIG. 6B). The LSRs can function on human chromosomal DNA and Kp03 and Pa01 emerged as top candidates in terms of efficiency.

[0703] Landing pad integration may be most useful when the landing pad is known to be at a single genomic site in all cells. To develop single position landing pad lines, landing pad LSR-GFP construct was integrated via low MOI lentivirus, resulting in a single copy of the landing pad per cell. Clonal cell lines which should contain a single landing pad site were then sorted, expanded, and electroporated with the attP-mCherry donor plasmid. Using this landing pad assay, four integrase candidates (Ec03, Ec04, Kp03, and Pa01) were tested and Pa01 performed better than Bxb1 in terms of the percentage of cells that were stably fluorescent after 11 days (FIG. 2F). With a tripled donor DNA dose (3000 ng), Pa01 reached 52% efficiency, while Bxb1 remained at 3% integration (FIG. 2M). In one Pa01 experiment, electroporating cells with donor plasmids twice increased integration efficiency to over 70% (FIG. 2G). Differences in efficiencies were reduced at higher donor DNA doses (FIGS. 6C-6D), suggesting variable integration kinetics for the different LSRs.

[0704] Previous characterization of the Bxb1 attB identified a sequence as short as 38 bp as being necessary for integration, but the computational pipeline conservatively predicted 100 bp attB sequences initially. A minimum 33 base pair attB for efficient Pa01 recombination was determined, but efficient recombination for Kp03 was seen down to a 25 base pair attB (FIG. 6F). At short lengths, the attachment sites can be easily installed during cloning and cell engineering through a variety of methods.

[0705] Efficient landing pads could be especially useful for multiplex gene integration, which could be achieved by using several of LSRs in parallel, given that they do not operate on each other's attachment sites (FIG. 2D). Interestingly, other well-studied LSRs Bxb1 and PhiC31 contain a modular dinucleotide core in their attachment sites that can be changed to enable orthogonal integrations (Ghosh, Kim, and Hatfull 2003 Molecular Cell 12 (5): 1101-11, incorporated herein by reference in its entirety), such that the same LSR can be applied to direct multiple cargoes to specific landing pads that differ by their core dinucleotides. The ability to substitute core dinucleotides was tested using the plasmid recombination assay for one of the LSRs, Kp03 (FIG. 6G). Changing either nucleotide of the dinucleotide core in one attachment site dramatically reduced integration efficiency, and subsequently changing the other attachment site to match the first restored integration efficiency. This suggested that this LSR could be used to orthogonally integrate different cargos at up to 10 different attachment site landing pads.

[0706] The specificity of these LSRs was tested by transfecting attP-pEF1a-mCherry donors with or without co-transfected LSR into wildtype K562 cells and measuring mCherry expression 18 days later, by which point episomal donor plasmid is no longer detectable. Pa01 showed no evidence of mCherry integration above background, while Kp03 did have elevated mCherry+fluorescence, suggesting it has off-target pseudosites (FIG. 2H). To identify these sites, the UDiTaS™ genome-wide single-sided PCR-based sequencing assay was modified for use as an LSR integration site mapping assay. After optimizing this assay, the proportion of target-derived reads was increased from 1.6% to 73.2% (FIG. 6J). This assay was first performed on the landing pad cell lines, allowing estimation of the percentage of off-target integrations relative to integrations on-target integrations (FIG. 2I).

[0707] This assay detected off-target integration for all LSRs, including Bxb1 (3.48%+/−2.98%, 9 unique reads across 9 integration loci) and Pa01 (0.47%+/−0.46%, 13 unique reads across 10 loci), but Kp03 had significantly more than the others at 15.5%+/−2.43%, with 312 unique reads detected across 83 different loci, confirming a relatively high percentage of off-target integrations. Wild-type cells that were transfected with Kp03 and Pa01 were sequenced using the integration site mapping assay at high coverage, and 79 off-target genome integration loci were detected for Pa01, and 2,415 off-target integration loci were detected for Kp03. From these integration sites, the target site motifs targeted by these LSRs were identified, and the motifs showed conservation at the dinucleotide core and flanking sequence, indicating that these are bona fide integrations rather than random plasmid integrations (FIG. 2H). Together, these results establish Pa01 as a more efficient and comparably specific landing pad LSR in comparison to BxB1.

[0708] A second batch of 21 LSRs were selected from the database, prioritizing those with low BLAST similarity between their attB/P sites and the human genome, and applying stringent quality thresholds. 17 out of 21 (81%) of them were functional in the plasmid recombination assay, providing validation of the computational pipeline for identifying functional candidates. Promisingly, 16 candidates had higher mCherry+MFI values than PhiC31, and 11 candidates had higher MFI values than Bxb1 (FIG. 2J). The integration fluorescence assay in wild-type cells using top candidates identified 3 with low percentage off-target integrations (FIG. 6K), with Si74 being a top candidate with favorable performance in terms of both plasmid recombination efficiency and off-target integrations (FIG. 2K).

### Example 3

Genome-Targeting LSRs Integrate into Human Genome at Predicted Target Sites

[0709] A particularly useful LSR would be one that integrates directly into only one, or very few, pseudosites in safe locations in the human genome and does so with appreciable efficiency. Historically, LSRs with pseudosites such as that for PhiC31 had to be experimentally discovered by transfecting the LSR into human cells and searching for the integration sites. While effective in demonstrating proof of concept, this approach has not yielded highly efficient and specific human genome-targeting LSRs. BLAST was used to search all attB/P sequences against the GRCh38 human genome assembly (FIG. 3A) and 856 LSRs with a highly significant match for at least one site were identified in the human genome (BLAST E-value <1e-3, FIG. 3B). Many of these LSR-attachment site predictions did not meet the quality control thresholds, but BLAST match quality was prioritized when selecting candidates, and 103 LSRs of varying quality were synthesized, attP and attB sites were renamed according to their BLAST hits, with the attachment site that matched the human genome being renamed to attA (acceptor), and the other being renamed to attD (donor). The predicted target site in the human genome was renamed attH (human) (FIGS. 3A and 3D).

[0710] All 103 candidates were tested in the plasmid recombination assay, and 27 candidates recombined at predicted attachment sites (one-tailed t-test, P<0.05; FIG. 3C), with 4 out of 64 (6.25%) low-quality candidates recombining as predicted, and 21 out of 37 (56.75%) high-quality candidates recombining as predicted (FIG. 7A). In subsequent batches of genome-targeting candidates, only high-quality LSR-attachment site predictions were utilized, which included 201 unique LSRs with attachment sites that significantly matched sites in the human genome (BLAST E-value <1e-3).

[0711] To determine if these LSRs could target the chromosomes directly in human K562 cells, another plasmid recombination assay was performed, replacing the native attA with the human pseudosite (or attH) instead of the native attachment site and found 4 of the candidates recombined with their predicted attH: Sp56, Pf80, Ps45, and Enc3 (FIG. 3D). This was followed by a human genome integration assay and an integration site mapping assay. Several integration sites were detected for all of these candidates when using both circular donor plasmids and linear PCR amplicons. For Sp56 and Pf80, the integration sites with the most unique reads (presumed to be the most frequently target loci) across experiments were the target sites that were predicted by BLAST alignments, an exon of SPATA20 and an exon of FKBP2, respectively (FIG. 3E). For Enc3, the predicted target site had the 12th most reads of all loci with detected integrations. Ps45 had detected reads at the predicted target site in one experiment, but coverage was too low to estimate relative specificity. Examples of reads from the integration site mapping assay aligned to the predicted site are shown in FIGS. 3F, 7C and 7D. These four examples demonstrated that candidates can be selected prior to experimental validation based on BLAST similarity to the human genome, and that 4 out of 27 (14.8%) functional candidates tested were able to recombine with the predicted site.

[0712] Of these four candidates, Pf80 had the highest predicted specificity, with 34.3% of unique reads mapping to the predicted target site, an exon of the gene FKBP2 at position 64,243,293 on chromosome 11 (FIG. 3F). But in the efficiency assay, Pf80, Sp56, and Ps45 did not have mCherry+fluorescence above background, suggesting low overall efficiency (FIG. 3G). Enc3 had the highest efficiency of these candidates, with 6% of cells being mCherry+ at day 18 after transfection. Other genome-targeting candidates were subsequently tested, Dn29 and Vp82, had 4.5% and 2.5% mCherry+cells in the efficiency assay, respectively, but no integrations were detected at their predicted target sites in the integration site mapping assay (FIGS. 3G-3H). Dn29 had relatively high specificity, with 17.4% of unique reads mapping to its top target site, and 33.0% of unique reads mapping to the top three target sites. An analysis of Dn29 and Vp82 integration sites revealed distinct sequence profiles of their targets, which may inform future efforts to engineer and optimize these candidates (FIGS. 3I-3J and 7E-7F). Several of these candidates outperform PhiC31 in terms of efficiency and specificity, with Dn29 having a favorable mix of both, making them promising genome-targeting candidates. An ideal genome-targeting LSR would integrate with robust efficiency in a site-specific manner. The genome-targeting candidates tested exhibited varying levels of efficiency, with Enc3 and Dn29 in particular having significantly higher efficiency (6% and 5%, respectively) than PhiC31 or Pf80 (both <1%: FIG. 3G). For Dn29, 61.9% of integrations occurred in just the top 5 target sites, which were found in intronic or intergenic regions (FIGS. 3K-3L).

### Example 4

Multi-Targeting LSRs Directly Integrate DNA into the Human Genome

[0713] An LSR is considered to be a good multi-targeting candidate if it has relaxed specificity requirements, if it appears in the multi-targeting clade (FIG. 1B), and/or if it has DUF4368, a Pfam domain that was found to correlate with the multi-targeting clade (FIG. 5A).

[0714] One such multi-targeting LSR found in Clostridium perfringens, named Cp36, was characterized. This LSR is 544 amino acids in length, and it contains a predicted DUF4368 domain at its C-terminus. This LSR can integrate an mCherry donor cargo into the genome of K562 cells at up to 40% efficiency without pre-installation of a landing pad or antibiotic selection (FIG. 4A). This high level of integration efficiency was verified in HEK293FT cells, utilizing both plasmid DNA and linear PCR amplicons as the donor cargo (FIG. 8A). Using the integration site mapping assay, over 2000 unique integration sites were found, with a strong bias toward specific sites (FIGS. 4B and 8C). The locus with the most integration events, chr1:101,429,889 (w.r.t. GRCh38), was the target of approximately 2% of all integration events. There was high concordance across the two cell types, with a jaccard similarity of 20% among the top 100 sites in both cell types, and a jaccard similarity of 17.8% among the top 200 sites. The number of unique reads at the top 61 sites that were found in both cell types is highly correlated (Pearson's r=0.45, P=0.0002. FIGS. 8D and 11A), suggesting that the relative efficiency of integration at these sites is quite consistent across cell types.

[0715] Using these precise prediction of human integration sites, a sequence motif targeted by Cp36 was reconstructed (FIG. 4C). This sequence motif is composed of an A-rich 5′ region, followed by the AA dinucleotide core, followed by a 3′ T-rich region. The natural attB in the C. perfringens genome and three commonly targeted human genome target sites, it was clear that the three human genome integration sites were close matches for the motif. One target site having low efficiency integration in both cell types was also a good match for the motif, although with shorter stretches of A and T nucleotides on the 5′ and 3′ ends. The poly-A and poly-T flanks matched previous descriptions of the natural attB for TndX, a previously characterized LSR that is 35.4% identical to Cp36 at the amino acid level.

[0716] To compare the efficiency of Cp36 to the PiggyBac (PB) transposase, a commonly used tool for delivering DNA cargos at random into TTAA tetranucleotides found in a target genome, a plasmid construct was designed that included a Cp36 attD (donor attachment site), PB ITR sequences, and an mCherry reporter (FIG. 8E). Cp36 performed at similar efficiencies to PB (FIG. 4D). Cp36 catalyzed uni-directional integration like other site-specific LSRs (FIGS. 4E, 8F and 8G), whereas PB has been shown to be bi-directional, resulting in both excision and local hopping of cargo upon PB redosing.

[0717] To test if Cp36 could be re-used to integrate a second gene, a pure population of mCherry+cells was generated via Cp36-mediated integration and puromycin selection, and re-electroporated with Cp36 and a donor containing BFP. After 13 days, 9% of the cells were double positive (mCherry+ and BFP+) (FIGS. 4F and 11E), without any reduction in mCherry (FIG. 11F), demonstrating delivery of a second gene without loss of the first cargo. Further, it was found that simultaneous delivery of Cp36 with both mCherry and BFP fluorescent reporter donors resulted in stable populations expressing both markers (FIG. 4G), suggesting that Cp36 could be used to generate cells with multi-part genetic circuits in a single transfection.

[0718] Additionally, two other orthologs (Pc01 and Enc9) were found in the database that also functioned as multi-targeters in human cells with efficiencies of 13% and 35% (FIG. 8B). These results reveal the existence of a subset of LSRs, not previously tested in eukaryotic cells, with highly efficient, unidirectional integration activity and longer targeted DNA motifs (≥20 bp) compared to lentivirus or transposase systems (2-4 bp).

### Example 5

### Biological Role of LSR Target Genes

[0719] Genes that were targeted and disrupted upon LSR integration could indicate an evolved strategy for LSR-carrying MGEs. Pfam domains that were enriched among target genes were identified (FIG. 5E). Enriched domains were found in Magnesium chelatases, Competence proteins, Type II/IV secretion system proteins, and HNH endonucleases, among others. Gene ontology (GO) pathway analysis of the target genes identified six pathways that were significantly enriched (FDR<0.1: FIG. 5F). Notably, the GO term “establishment of competence for transformation” (GO:0030420) was the most significantly enriched pathway with 15 target gene clusters being annotated with this term. Among these target genes was the ComK transcription factor and other ComG operon proteins, suggesting that disrupting competence and DNA transformation is a common strategy for LSR-carrying MGEs. Reasoning that LSRs may have also evolved to target host anti-phage defense systems upon integration, relevant genomes were annotated using DefenseFinder and genes that occurred in or near these identified systems were searched. Some defense genes that were targeted by integrases, including CRISPR spacer acquisition gene cas2, CASCADE complex helicase cas3, Type I restriction modification enzymes. Hachiman defense gene hamA, and a UvrD-like helicase gene were identified. However, defense genes were rarely targeted by LSRs, and no enrichment of target genes was found near defense genes, suggesting this is not a common strategy (FIG. 5G). These findings support an evolved strategy adopted by LSR-carrying MGEs that limits further horizontal gene transfer primarily through disruption of competence.

### Example 6

### Post Hoc Identification of Human Genome Integration

[0720] A post hoc analysis of the genome-targeting and multi-targeting candidates in this study was performed to determine how feasible a motif-based search would be. Starting with each experimentally characterized candidate, sequence motifs were built by iteratively adding natural attB sequences of the next most closely related LSR ortholog, only adding additional attB sequences if they were 95% identical or less to already selected attB sequences. Motifs of 20, 50 and 100 such attB sequences were built. Then these motifs were searched against the experimentally observed human integration sites, and approximately 30.000 randomly selected human genome sequences. Next, these sequences were iterated across motif score cutoffs and the true positive rate and the false positive rate were calculated at each cutoff, generating a ROC curve (FIG. 12A). For each LSR, the motif with the greatest AUC was selected.

[0721] Sequence motifs belonging to the multi-targeting candidates performed quite well, with AUC values ranging from 0.94 for the Cp36 motif to 0.68 for the Bt24 motif. For the genome-targeting candidates the performance of the sequence motifs varied, ranging in AUC values from 0.65 for Dn29 to 0.44 for Enc3. All of these motifs assigned significantly higher scores to observed integration sites than randomly selected controls, except for Sp56 and Enc3, which did not differ significantly (Wilcoxon rank-sum test; P<0.0001 for Cp36, Enc9, Pc01, Bt24, and Dn29, P<0.01 for Pf80, P>0.05 for Sp56 and Enc3). Despite the relatively poor performance of the Pf80 motif and the Sp56 motif, they did assign the highest motif scores to the most frequently targeted human genome integration sites, suggesting that there is predictive value to their database-derived sequence motifs (FIG. 12B). Upon visual inspection of the motifs a variety of patterns were seen, with Cp36 and Enc9 motifs having the characteristic AT rich motifs typical of many multi-targeting LSRs, and others such as Dn29 and Bt24 having less variation and less well-defined boundaries (FIG. 12C).

[0722] These results suggest that there is value in taking a motif-based sequence search when prioritizing multi-targeting and genome-targeting candidates. The potential targeting profile of multi-targeters could be better understood prior to experimental validation, as with Cp36 and Enc9, and genome-targeting candidates could be selected based on those that have high, outlier motif matches that could indicate higher specificity, such as for Pf80. The difference in performance between motifs may be explained by the different selection pressures placed on multi-targeting and single-targeting LSRs, where multi-targeting LSRs are more likely to maintain their relaxed sequence specificity across larger evolutionary distances due to a greater abundance of possible target sites, leading to more accurate sequence motifs. These results could also have been influenced by the efficiency of the LSR in human cells or epigenetic modifications such as those that influence chromatin accessibility (FIG. 8H).

[0723] All references, including publications, patent applications, and patents, cited herein are hereby incorporated by reference to the same extent as if each reference were individually and specifically indicated to be incorporated by reference and were set forth in its entirety herein.

[0724] Preferred embodiments of this invention are described herein, including the best mode known to the inventors for carrying out the invention. Variations of those preferred embodiments may become apparent to those of ordinary skill in the art upon reading the foregoing description. The inventors expect skilled artisans to employ such variations as appropriate, and the inventors intend for the invention to be practiced otherwise than as specifically described herein. Accordingly, this invention includes all modifications and equivalents of the subject matter recited in the claims appended hereto as permitted by applicable law. Moreover, any combination of the above-described elements in all possible variations thereof is encompassed by the invention unless otherwise indicated herein or otherwise clearly contradicted by context.

Table 1:
Landing Pad Integrases

| | attP | attB | Protein |
|---|---|---|---|
| | sequence | sequence | sequence |
| | SEQ ID | SEQ ID | SEQ ID |
| LSR | NOs: | NOs: | NOs: |
| Sh25 | 1184 | 1216 | 1 |
| Si74 | 1185 | 1217 | 2 |
| Bm99 | 1186 | 1218 | 3 |
| Me99 | 1187 | 1219 | 4 |
| Ma37 | 1188 | 1220 | 5 |
| Nm60 | 1189 | 1221 | 6 |
| Cc91 | 1190 | 1222 | 7 |
| Vh19 | 1191 | 1223 | 8 |
| Cs56 | 1192 | 1224 | 9 |
| Bt24 | 1193 | 1225 | 10 |
| No67 | 1194 | 1226 | 11 |
| Fm04 | 1195 | 1227 | 12 |
| Bu30 | 1196 | 1228 | 13 |
| Ma05 | 1197 | 1229 | 14 |
| Rh64 | 1198 | 1230 | 15 |
| Cb16 | 1199 | 1231 | 16 |
| uCb4 | 1200 | 1232 | 17 |
| Ec03 | 1201 | 1233 | 18 |
| Ec04 | 1202 | 1234 | 19 |
| Ec05 | 1203 | 1235 | 20 |
| Ec06 | 1204 | 1236 | 21 |
| Ec07 | 1205 | 1237 | 22 |
| Ef01 | 1206 | 1238 | 23 |
| Ef02 | 1207 | 1239 | 24 |
| Kp01 | 1208 | 1240 | 25 |
| Kp03 | 1209 | 1241 | 26 |
| Kp04 | 1210 | 1242 | 27 |
| Kp05 | 1211 | 1243 | 28 |
| Pa01 | 1212 | 1244 | 29 |
| Pa03 | 1213 | 1245 | 30 |
| Sa01 | 1214 | 1246 | 31 |
| Sa02 | 1215 | 1247 | 32 |

Table 2:
Genome-Targeting Integrases

| | attD | attA | Protein |
|---|---|---|---|
| | sequence | sequence | sequence |
| | SEQ ID | SEQ ID | SEQ ID |
| LSR | NOs: | NOs: | NOs: |
| Pf13 | 1248 | 1282 | 33 |
| Td08 | 1249 | 1283 | 34 |
| Se37 | 1250 | 1284 | 35 |
| Ct03 | 1251 | 1285 | 36 |
| Ps40 | 1252 | 1286 | 38 |
| Sa10 | 1253 | 1287 | 39 |
| Td01 | 1254 | 1288 | 40 |
| Enc3 | 1255 | 1289 | 41 |
| Fp10 | 1256 | 1290 | 42 |
| Ph43 | 1257 | 1291 | 43 |
| Sm18 | 1258 | 1292 | 44 |
| Pf80 | 1259 | 1293 | 46 |
| Bs46 | 1260 | 1294 | 47 |
| Pf48 | 1261 | 1295 | 48 |
| Rb27 | 1262 | 1296 | 49 |
| Sa51 | 1263 | 1297 | 50 |
| Bc30 | 1264 | 1298 | 51 |
| Cd04 | 1265 | 1299 | 52 |
| Sa34 | 1266 | 1300 | 54 |
| Pp20 | 1267 | 1301 | 55 |
| Efs2 | 1268 | 1302 | 57 |
| Pf15 | 1269 | 1303 | 58 |
| Ps45 | 1270 | 1304 | 59 |
| Sp56 | 1271 | 1305 | 60 |
| Dn29 | 1272 | 1306 | 61 |
| Vh73 | 1273 | 1307 | 62 |
| Em12 | 1274 | 1308 | 63 |
| Pc64 | 1275 | 1309 | 64 |
| Vp82 | 1276 | 1310 | 65 |
| CMp1 | 1277 | 1311 | 69 |
| Pa19 | 1278 | 1312 | 70 |
| Pg17 | 1279 | 1313 | 71 |
| Sall | 1280 | 1314 | 72 |
| El01 | 1281 | 1315 | 73 |

Table 3:
Multi-Targeting Integrases

| | attD | attA | Protein |
|---|---|---|---|
| | sequence | sequence | sequence |
| | SEQ ID | SEQ ID | SEQ ID |
| LSR | NOs: | NOs: | NOs: |
| Cp36 | 1316 | 1324 | 66 |
| Pc01 | 1317 | 1325 | 67 |
| Enc9 | 1318 | 1326 | 68 |
| Cd16 | 1319 | 1327 | 45 |
| Cd15 | 1320 | 1328 | 53 |
| Cd31 | 1321 | 1329 | 37 |
| Rl09 | 1322 | 1330 | 56 |
| Cd08 | 1323 | 1331 | 74 |
| | Table 4: | | |
| | LSR Protein | | |
| | sequence | attB sequence | attP sequence |
| | SEQ ID NOs: | SEQ ID NOs: | SEQ ID NOs: |
| | 88 | 1332 | 2413 |
| | 89 | 1333 | 2414 |
| | 90 | 1334 | 2415 |
| | 91 | 1335 | 2416 |
| | 92 | 1336 | 2417 |
| | 93 | 1337 | 2418 |
| | 94 | 1338 | 2419 |
| | 95 | 1339 | 2420 |
| | 96 | 1340 | 2421 |
| | 97 | 1341 | 2422 |
| | 98 | 1342 | 2423 |
| | 99 | 1343 | 2424 |
| | 100 | 1344 | 2425 |
| | 101 | 1345 | 2426 |
| | 102 | 1346 | 2427 |
| | 103 | 1347 | 2428 |
| | 104 | 1348 | 2429 |
| | 105 | 1349 | 2430 |
| | 106 | 1350 | 2431 |
| | 107 | 1351 | 2432 |
| | 108 | 1352 | 2433 |
| | 109 | 1353 | 2434 |
| | 110 | 1354 | 2435 |
| | 111 | 1355 | 2436 |
| | 112 | 1356 | 2437 |
| | 113 | 1357 | 2438 |
| | 114 | 1358 | 2439 |
| | 115 | 1359 | 2440 |
| | 116 | 1360 | 2441 |
| | 117 | 1361 | 2442 |
| | 118 | 1362 | 2443 |
| | 119 | 1363 | 2444 |
| | 120 | 1364 | 2445 |
| | 121 | 1365 | 2446 |
| | 122 | 1366 | 2447 |
| | 123 | 1367 | 2448 |
| | 124 | 1368 | 2449 |
| | 125 | 1369 | 2450 |
| | 126 | 1370 | 2451 |
| | 127 | 1371 | 2452 |
| | 128 | 1372 | 2453 |
| | 129 | 1373 | 2454 |
| | 130 | 1374 | 2455 |
| | 131 | 1375 | 2456 |
| | 132 | 1376 | 2457 |
| | 133 | 1377 | 2458 |
| | 134 | 1378 | 2459 |
| | 135 | 1379 | 2460 |
| | 136 | 1380 | 2461 |
| | 137 | 1381 | 2462 |
| | 138 | 1382 | 2463 |
| | 139 | 1383 | 2464 |
| | 140 | 1384 | 2465 |
| | 141 | 1385 | 2466 |
| | 142 | 1386 | 2467 |
| | 143 | 1387 | 2468 |
| | 144 | 1388 | 2469 |
| | 145 | 1389 | 2470 |
| | 146 | 1390 | 2471 |
| | 147 | 1391 | 2472 |
| | 148 | 1392 | 2473 |
| | 149 | 1393 | 2474 |
| | 150 | 139 | 2475 |
| | 151 | 1395 | 2476 |
| | 152 | 1396 | 2477 |
| | 153 | 1397 | 2478 |
| | 154 | 1398 | 2479 |
| | 155 | 1399 | 2480 |
| | 156 | 1400 | 2481 |
| | 157 | 1401 | 2482 |
| | 158 | 1402 | 2483 |
| | 159 | 1403 | 2484 |
| | 160 | 1404 | 2485 |
| | 161 | 1405 | 2486 |
| | 162 | 1406 | 2487 |
| | 163 | 1407 | 2488 |
| | 164 | 1408 | 2489 |
| | 165 | 1409 | 2490 |
| | 166 | 1410 | 2491 |
| | 167 | 1411 | 2492 |
| | 168 | 1412 | 2493 |
| | 169 | 1413 | 2494 |
| | 170 | 1414 | 2495 |
| | 171 | 1415 | 2496 |
| | 172 | 1416 | 2497 |
| | 173 | 1417 | 2498 |
| | 174 | 1418 | 2499 |
| | 175 | 1419 | 2500 |
| | 176 | 1420 | 2501 |
| | 177 | 1421 | 2502 |
| | 178 | 1422 | 2503 |
| | 179 | 1423 | 2504 |
| | 180 | 1424 | 2505 |
| | 181 | 1425 | 2506 |
| | 182 | 1426 | 2507 |
| | 183 | 1427 | 2508 |
| | 184 | 1428 | 2509 |
| | 185 | 1429 | 2510 |
| | 186 | 1430 | 2511 |
| | 187 | 1431 | 2512 |
| | 188 | 1432 | 2513 |
| | 189 | 1433 | 2514 |
| | 190 | 1434 | 2515 |
| | 191 | 1435 | 2516 |
| | 192 | 1436 | 2517 |
| | 193 | 1437 | 2518 |
| | 194 | 1438 | 2519 |
| | 195 | 1439 | 2520 |
| | 196 | 1440 | 2521 |
| | 197 | 1441 | 2522 |
| | 198 | 1442 | 2523 |
| | 199 | 1443 | 2524 |
| | 200 | 1444 | 2525 |
| | 201 | 1445 | 2526 |
| | 202 | 1446 | 2527 |
| | 203 | 1447 | 2528 |
| | 204 | 1448 | 2529 |
| | 205 | 1449 | 2530 |
| | 206 | 1450 | 2531 |
| | 207 | 1451 | 2532 |
| | 208 | 1452 | 2533 |
| | 209 | 1453 | 2534 |
| | 210 | 1454 | 2535 |
| | 211 | 1455 | 2536 |
| | 212 | 1456 | 2537 |
| | 213 | 1457 | 2538 |
| | 214 | 1458 | 2539 |
| | 215 | 1459 | 2540 |
| | 216 | 1460 | 2541 |
| | 217 | 1461 | 2542 |
| | 218 | 1462 | 2543 |
| | 219 | 1463 | 2544 |
| | 220 | 1464 | 2545 |
| | 221 | 1465 | 2546 |
| | 222 | 1466 | 2547 |
| | 223 | 1467 | 2548 |
| | 224 | 1468 | 2549 |
| | 225 | 1469 | 2550 |
| | 226 | 1470 | 2551 |
| | 227 | 1471 | 2552 |
| | 228 | 1472 | 2553 |
| | 229 | 1473 | 2554 |
| | 230 | 1474 | 2555 |
| | 231 | 1475 | 2556 |
| | 232 | 1476 | 2557 |
| | 233 | 1477 | 2558 |
| | 234 | 1478 | 2559 |
| | 235 | 1479 | 2560 |
| | 236 | 1480 | 2561 |
| | 237 | 1481 | 2562 |
| | 238 | 1482 | 2563 |
| | 239 | 1483 | 2564 |
| | 240 | 1484 | 2565 |
| | 241 | 1485 | 2566 |
| | 242 | 1486 | 2567 |
| | 243 | 1487 | 2568 |
| | 244 | 1488 | 2569 |
| | 245 | 1489 | 2570 |
| | 246 | 1490 | 2571 |
| | 247 | 1491 | 2572 |
| | 248 | 1492 | 2573 |
| | 249 | 1493 | 2574 |
| | 250 | 1494 | 2575 |
| | 251 | 1495 | 2576 |
| | 252 | 1496 | 2577 |
| | 253 | 1497 | 2578 |
| | 254 | 1498 | 2579 |
| | 255 | 1499 | 2580 |
| | 256 | 1500 | 2581 |
| | 257 | 1501 | 2582 |
| | 258 | 1502 | 2583 |
| | 259 | 1503 | 2584 |
| | 260 | 1504 | 2585 |
| | 261 | 1505 | 2586 |
| | 262 | 1506 | 2587 |
| | 263 | 1507 | 2588 |
| | 264 | 1508 | 2589 |
| | 265 | 1509 | 2590 |
| | 266 | 1510 | 2591 |
| | 267 | 1511 | 2592 |
| | 268 | 1512 | 2593 |
| | 269 | 1513 | 2594 |
| | 270 | 1514 | 2595 |
| | 271 | 1515 | 2596 |
| | 272 | 1516 | 2597 |
| | 273 | 1517 | 2598 |
| | 274 | 1518 | 2599 |
| | 275 | 1519 | 2600 |
| | 276 | 1520 | 2601 |
| | 277 | 1521 | 2602 |
| | 278 | 1522 | 2603 |
| | 279 | 1523 | 2604 |
| | 280 | 1524 | 2605 |
| | 281 | 1525 | 2606 |
| | 282 | 1526 | 2607 |
| | 283 | 1527 | 2608 |
| | 284 | 1528 | 2609 |
| | 285 | 1529 | 2610 |
| | 286 | 1530 | 2611 |
| | 287 | 1531 | 2612 |
| | 288 | 1532 | 2613 |
| | 289 | 1533 | 2614 |
| | 290 | 1534 | 2615 |
| | 291 | 1535 | 2616 |
| | 292 | 1536 | 2617 |
| | 293 | 1537 | 2618 |
| | 294 | 1538 | 2619 |
| | 295 | 1539 | 2620 |
| | 296 | 1540 | 2621 |
| | 297 | 1541 | 2622 |
| | 298 | 1542 | 2623 |
| | 299 | 1543 | 2624 |
| | 300 | 1544 | 2625 |
| | 301 | 1545 | 2626 |
| | 302 | 1546 | 2627 |
| | 303 | 1547 | 2628 |
| | 304 | 1548 | 2629 |
| | 305 | 1549 | 2630 |
| | 306 | 1550 | 2631 |
| | 307 | 1551 | 2632 |
| | 308 | 1552 | 2633 |
| | 309 | 1553 | 2634 |
| | 310 | 1554 | 2635 |
| | 311 | 1555 | 2636 |
| | 312 | 1556 | 2637 |
| | 313 | 1557 | 2638 |
| | 314 | 1558 | 2639 |
| | 315 | 1559 | 2640 |
| | 316 | 1560 | 2641 |
| | 317 | 1561 | 2642 |
| | 318 | 1562 | 2643 |
| | 319 | 1563 | 2644 |
| | 320 | 1564 | 2645 |
| | 321 | 1565 | 2646 |
| | 322 | 1566 | 2647 |
| | 323 | 1567 | 2648 |
| | 324 | 1568 | 2649 |
| | 325 | 1569 | 2650 |
| | 326 | 1570 | 2651 |
| | 327 | 1571 | 2652 |
| | 328 | 1572 | 2653 |
| | 329 | 1573 | 2654 |
| | 330 | 1574 | 2655 |
| | 331 | 1575 | 2656 |
| | 332 | 1576 | 2657 |
| | 333 | 1577 | 2658 |
| | 334 | 1578 | 2659 |
| | 335 | 1579 | 2660 |
| | 336 | 1580 | 2661 |
| | 337 | 1581 | 2662 |
| | 338 | 1582 | 2663 |
| | 339 | 1583 | 2664 |
| | 340 | 1584 | 2665 |
| | 341 | 1585 | 2666 |
| | 342 | 1586 | 2667 |
| | 343 | 1587 | 2668 |
| | 344 | 1588 | 2669 |
| | 345 | 1589 | 2670 |
| | 346 | 1590 | 2671 |
| | 347 | 1591 | 2672 |
| | 348 | 1592 | 2673 |
| | 349 | 1593 | 2674 |
| | 350 | 1594 | 2675 |
| | 351 | 1595 | 2676 |
| | 352 | 1596 | 2677 |
| | 353 | 1597 | 2678 |
| | 354 | 1598 | 2679 |
| | 355 | 1599 | 2680 |
| | 356 | 1600 | 2681 |
| | 357 | 1601 | 2682 |
| | 358 | 1602 | 2683 |
| | 359 | 1603 | 2684 |
| | 360 | 1604 | 2685 |
| | 361 | 1605 | 2686 |
| | 362 | 1606 | 2687 |
| | 363 | 1607 | 2688 |
| | 364 | 1608 | 2689 |
| | 365 | 1609 | 2690 |
| | 366 | 1610 | 2691 |
| | 367 | 1611 | 2692 |
| | 368 | 1612 | 2693 |
| | 369 | 1613 | 2694 |
| | 370 | 1614 | 2695 |
| | 371 | 1615 | 2696 |
| | 372 | 1616 | 2697 |
| | 373 | 1617 | 2698 |
| | 374 | 1618 | 2699 |
| | 375 | 1619 | 2700 |
| | 376 | 1620 | 2701 |
| | 377 | 1621 | 2702 |
| | 378 | 1622 | 2703 |
| | 379 | 1623 | 2704 |
| | 380 | 1624 | 2705 |
| | 381 | 1625 | 2706 |
| | 382 | 1626 | 2707 |
| | 383 | 1627 | 2708 |
| | 384 | 1628 | 2709 |
| | 385 | 1629 | 2710 |
| | 386 | 1630 | 2711 |
| | 387 | 163 | 2712 |
| | 388 | 1632 | 2713 |
| | 389 | 1633 | 2714 |
| | 390 | 1634 | 2715 |
| | 391 | 1635 | 2716 |
| | 392 | 1636 | 2717 |
| | 393 | 1637 | 2718 |
| | 394 | 1638 | 2719 |
| | 395 | 1639 | 2720 |
| | 396 | 1640 | 2721 |
| | 397 | 1641 | 2722 |
| | 398 | 1642 | 2723 |
| | 399 | 1643 | 2724 |
| | 400 | 1644 | 2725 |
| | 401 | 1645 | 2726 |
| | 402 | 1646 | 2727 |
| | 403 | 1647 | 2728 |
| | 404 | 1648 | 2729 |
| | 405 | 1649 | 2730 |
| | 406 | 1650 | 2731 |
| | 407 | 1651 | 2732 |
| | 408 | 1652 | 2733 |
| | 409 | 1653 | 2734 |
| | 410 | 1654 | 2735 |
| | 411 | 1655 | 2736 |
| | 412 | 1656 | 2737 |
| | 413 | 1657 | 2738 |
| | 414 | 1658 | 2739 |
| | 415 | 1659 | 2740 |
| | 416 | 1660 | 2741 |
| | 417 | 1661 | 2742 |
| | 418 | 1662 | 2743 |
| | 419 | 1663 | 2744 |
| | 420 | 1664 | 2745 |
| | 421 | 1665 | 2746 |
| | 422 | 1666 | 2747 |
| | 423 | 1667 | 2748 |
| | 424 | 1668 | 2749 |
| | 425 | 1669 | 2750 |
| | 426 | 1670 | 2751 |
| | 427 | 1671 | 2752 |
| | 428 | 1672 | 2753 |
| | 429 | 1673 | 2754 |
| | 430 | 1674 | 2755 |
| | 431 | 1675 | 2756 |
| | 432 | 1676 | 2757 |
| | 433 | 1677 | 2758 |
| | 434 | 1678 | 2759 |
| | 435 | 1679 | 2760 |
| | 436 | 1680 | 2761 |
| | 437 | 1681 | 2762 |
| | 438 | 1682 | 2763 |
| | 439 | 1683 | 2764 |
| | 440 | 1684 | 2765 |
| | 441 | 1685 | 2766 |
| | 442 | 1686 | 2767 |
| | 443 | 1687 | 2768 |
| | 444 | 1688 | 2769 |
| | 445 | 1689 | 2770 |
| | 446 | 1690 | 2771 |
| | 447 | 1691 | 2772 |
| | 448 | 1692 | 2773 |
| | 449 | 1693 | 2774 |
| | 450 | 1694 | 2775 |
| | 451 | 1695 | 2776 |
| | 452 | 1696 | 2777 |
| | 453 | 1697 | 2778 |
| | 454 | 1698 | 2779 |
| | 455 | 1699 | 2780 |
| | 456 | 1700 | 2781 |
| | 457 | 1701 | 2782 |
| | 458 | 1702 | 2783 |
| | 459 | 1703 | 2784 |
| | 460 | 1704 | 2785 |
| | 461 | 1705 | 2786 |
| | 462 | 1706 | 2787 |
| | 463 | 1707 | 2788 |
| | 464 | 1708 | 2789 |
| | 465 | 1709 | 2790 |
| | 466 | 1710 | 2791 |
| | 467 | 1711 | 2792 |
| | 468 | 1712 | 2793 |
| | 469 | 1713 | 2794 |
| | 470 | 1714 | 2795 |
| | 471 | 1715 | 2796 |
| | 472 | 1716 | 2797 |
| | 473 | 1717 | 2798 |
| | 474 | 1718 | 2799 |
| | 475 | 1719 | 2800 |
| | 476 | 1720 | 2801 |
| | 477 | 1721 | 2802 |
| | 478 | 1722 | 2803 |
| | 479 | 1723 | 2804 |
| | 480 | 1724 | 2805 |
| | 481 | 1725 | 2806 |
| | 482 | 1726 | 2807 |
| | 483 | 1727 | 2808 |
| | 484 | 1728 | 2809 |
| | 485 | 1729 | 2810 |
| | 486 | 1730 | 2811 |
| | 487 | 1731 | 2812 |
| | 488 | 1732 | 2813 |
| | 489 | 1733 | 2814 |
| | 490 | 1734 | 2815 |
| | 491 | 1735 | 2816 |
| | 492 | 1736 | 2817 |
| | 493 | 1737 | 2818 |
| | 494 | 1738 | 2819 |
| | 495 | 1739 | 2820 |
| | 496 | 1740 | 2821 |
| | 497 | 1741 | 2822 |
| | 498 | 1742 | 2823 |
| | 499 | 1743 | 2824 |
| | 500 | 1744 | 2825 |
| | 501 | 1745 | 2826 |
| | 502 | 1746 | 2827 |
| | 503 | 1747 | 2828 |
| | 504 | 1748 | 2829 |
| | 505 | 1749 | 2830 |
| | 506 | 1750 | 2831 |
| | 507 | 1751 | 2832 |
| | 508 | 1752 | 2833 |
| | 509 | 1753 | 2834 |
| | 510 | 1754 | 2835 |
| | 511 | 1755 | 2836 |
| | 512 | 1756 | 2837 |
| | 513 | 1757 | 2838 |
| | 514 | 1758 | 2839 |
| | 515 | 1759 | 2840 |
| | 516 | 1760 | 2841 |
| | 517 | 1761 | 2842 |
| | 518 | 1762 | 2843 |
| | 519 | 1763 | 2844 |
| | 520 | 1764 | 2845 |
| | 521 | 1765 | 2846 |
| | 522 | 1766 | 2847 |
| | 523 | 1767 | 2848 |
| | 524 | 1768 | 2849 |
| | 525 | 1769 | 2850 |
| | 526 | 1770 | 2851 |
| | 527 | 1771 | 2852 |
| | 528 | 1772 | 2853 |
| | 529 | 1773 | 2854 |
| | 530 | 1774 | 2855 |
| | 531 | 1775 | 2856 |
| | 532 | 1776 | 2857 |
| | 533 | 1777 | 2858 |
| | 534 | 1778 | 2859 |
| | 535 | 1779 | 2860 |
| | 536 | 1780 | 2861 |
| | 537 | 1781 | 2862 |
| | 538 | 1782 | 2863 |
| | 539 | 1783 | 2864 |
| | 540 | 1784 | 2865 |
| | 541 | 1785 | 2866 |
| | 542 | 1786 | 2867 |
| | 543 | 1787 | 2868 |
| | 544 | 1788 | 2869 |
| | 545 | 1789 | 2870 |
| | 546 | 1790 | 2871 |
| | 547 | 1791 | 2872 |
| | 548 | 1792 | 2873 |
| | 549 | 1793 | 2874 |
| | 550 | 1794 | 2875 |
| | 551 | 1795 | 2876 |
| | 552 | 1796 | 2877 |
| | 553 | 1797 | 2878 |
| | 554 | 1798 | 2879 |
| | 555 | 1799 | 2880 |
| | 556 | 1800 | 2881 |
| | 557 | 1801 | 2882 |
| | 558 | 1802 | 2883 |
| | 559 | 1803 | 2884 |
| | 560 | 1804 | 2885 |
| | 561 | 1805 | 2886 |
| | 562 | 1806 | 2887 |
| | 563 | 1807 | 2888 |
| | 564 | 1808 | 2889 |
| | 565 | 1809 | 2890 |
| | 566 | 1810 | 2891 |
| | 567 | 1811 | 2892 |
| | 568 | 1812 | 2893 |
| | 569 | 1813 | 2894 |
| | 570 | 1814 | 2895 |
| | 571 | 1815 | 2896 |
| | 572 | 1816 | 2897 |
| | 573 | 1817 | 2898 |
| | 574 | 1818 | 2899 |
| | 575 | 1819 | 2900 |
| | 576 | 1820 | 2901 |
| | 577 | 1821 | 2902 |
| | 578 | 1822 | 2903 |
| | 579 | 1823 | 2904 |
| | 580 | 1824 | 2905 |
| | 581 | 1825 | 2906 |
| | 582 | 1826 | 2907 |
| | 583 | 1827 | 2908 |
| | 584 | 1828 | 2909 |
| | 585 | 1829 | 2910 |
| | 586 | 1830 | 2911 |
| | 587 | 1831 | 2912 |
| | 588 | 1832 | 2913 |
| | 589 | 1833 | 2914 |
| | 590 | 1834 | 2915 |
| | 591 | 1835 | 2916 |
| | 592 | 1836 | 2917 |
| | 593 | 1837 | 2918 |
| | 594 | 1838 | 2919 |
| | 595 | 1839 | 2920 |
| | 596 | 1840 | 2921 |
| | 597 | 1841 | 2922 |
| | 598 | 1842 | 2923 |
| | 599 | 1843 | 2924 |
| | 600 | 1844 | 2925 |
| | 601 | 1845 | 2926 |
| | 602 | 1846 | 2927 |
| | 603 | 1847 | 2928 |
| | 604 | 1848 | 2929 |
| | 605 | 1849 | 2930 |
| | 606 | 1850 | 2931 |
| | 607 | 1851 | 2932 |
| | 608 | 1852 | 2933 |
| | 609 | 1853 | 2934 |
| | 610 | 1854 | 2935 |
| | 611 | 1855 | 2936 |
| | 612 | 1856 | 2937 |
| | 613 | 1857 | 2938 |
| | 614 | 1858 | 2939 |
| | 615 | 1859 | 2940 |
| | 616 | 1860 | 2941 |
| | 617 | 1861 | 2942 |
| | 618 | 1862 | 2943 |
| | 619 | 1863 | 2944 |
| | 620 | 1864 | 2945 |
| | 621 | 1865 | 2946 |
| | 622 | 1866 | 2947 |
| | 623 | 1867 | 2948 |
| | 624 | 1868 | 2949 |
| | 625 | 1869 | 2950 |
| | 626 | 1870 | 2951 |
| | 627 | 1871 | 2952 |
| | 628 | 1872 | 2953 |
| | 629 | 1873 | 2954 |
| | 630 | 1874 | 2955 |
| | 631 | 1875 | 2956 |
| | 632 | 1876 | 2957 |
| | 633 | 1877 | 2958 |
| | 634 | 1878 | 2959 |
| | 635 | 1879 | 2960 |
| | 636 | 1880 | 2961 |
| | 637 | 1881 | 2962 |
| | 638 | 1882 | 2963 |
| | 639 | 1883 | 2964 |
| | 640 | 1884 | 2965 |
| | 641 | 1885 | 2966 |
| | 642 | 1886 | 2967 |
| | 643 | 1887 | 2968 |
| | 644 | 1888 | 2969 |
| | 645 | 1889 | 2970 |
| | 646 | 1890 | 2971 |
| | 647 | 1891 | 2972 |
| | 648 | 1892 | 2973 |
| | 649 | 1893 | 2974 |
| | 650 | 1894 | 2975 |
| | 651 | 1895 | 2976 |
| | 652 | 1896 | 2977 |
| | 653 | 1897 | 2978 |
| | 654 | 1898 | 2979 |
| | 655 | 1899 | 2980 |
| | 656 | 1900 | 2981 |
| | 657 | 1901 | 2982 |
| | 658 | 1902 | 2983 |
| | 659 | 1903 | 2984 |
| | 660 | 1904 | 2985 |
| | 661 | 1905 | 2986 |
| | 662 | 1906 | 2987 |
| | 663 | 1907 | 2988 |
| | 664 | 1908 | 2989 |
| | 665 | 1909 | 2990 |
| | 666 | 1910 | 2991 |
| | 667 | 1911 | 2992 |
| | 668 | 1912 | 2993 |
| | 669 | 1913 | 2994 |
| | 670 | 1914 | 2995 |
| | 671 | 1915 | 2996 |
| | 672 | 1916 | 2997 |
| | 673 | 1917 | 2998 |
| | 674 | 1918 | 2999 |
| | 675 | 1919 | 3000 |
| | 676 | 1920 | 3001 |
| | 677 | 1921 | 3002 |
| | 678 | 1922 | 3003 |
| | 679 | 1923 | 3004 |
| | 680 | 1924 | 3005 |
| | 681 | 1925 | 3006 |
| | 682 | 1926 | 3007 |
| | 683 | 1927 | 3008 |
| | 684 | 1928 | 3009 |
| | 685 | 1929 | 3010 |
| | 686 | 1930 | 3011 |
| | 687 | 1931 | 3012 |
| | 688 | 1932 | 3013 |
| | 689 | 1933 | 3014 |
| | 690 | 1934 | 3015 |
| | 691 | 1935 | 3016 |
| | 692 | 1936 | 3017 |
| | 693 | 1937 | 3018 |
| | 694 | 1938 | 3019 |
| | 695 | 1939 | 3020 |
| | 696 | 1940 | 3021 |
| | 697 | 1941 | 3022 |
| | 698 | 1942 | 3023 |
| | 699 | 1943 | 3024 |
| | 700 | 1944 | 3025 |
| | 701 | 1945 | 3026 |
| | 702 | 1946 | 3027 |
| | 703 | 1947 | 3028 |
| | 704 | 1948 | 3029 |
| | 705 | 1949 | 3030 |
| | 706 | 1950 | 3031 |
| | 707 | 1951 | 3032 |
| | 708 | 1952 | 3033 |
| | 709 | 1953 | 3034 |
| | 710 | 1954 | 3035 |
| | 711 | 1955 | 3036 |
| | 712 | 1956 | 3037 |
| | 713 | 1957 | 3038 |
| | 714 | 1958 | 3039 |
| | 715 | 1959 | 3040 |
| | 716 | 1960 | 3041 |
| | 717 | 1961 | 3042 |
| | 718 | 1962 | 3043 |
| | 719 | 1963 | 3044 |
| | 720 | 1964 | 3045 |
| | 721 | 1965 | 3046 |
| | 722 | 1966 | 3047 |
| | 723 | 1967 | 3048 |
| | 724 | 1968 | 3049 |
| | 725 | 1969 | 3050 |
| | 726 | 1970 | 3051 |
| | 727 | 1971 | 3052 |
| | 728 | 1972 | 3053 |
| | 729 | 1973 | 3054 |
| | 730 | 1974 | 3055 |
| | 731 | 1975 | 3056 |
| | 732 | 1976 | 3057 |
| | 733 | 1977 | 3058 |
| | 734 | 1978 | 3059 |
| | 735 | 1979 | 3060 |
| | 736 | 1980 | 3061 |
| | 737 | 1981 | 3062 |
| | 738 | 1982 | 3063 |
| | 739 | 1983 | 3064 |
| | 740 | 1984 | 3065 |
| | 741 | 1985 | 3066 |
| | 742 | 1986 | 3067 |
| | 743 | 1987 | 3068 |
| | 744 | 1988 | 3069 |
| | 745 | 1989 | 3070 |
| | 746 | 1990 | 3071 |
| | 747 | 1991 | 3072 |
| | 748 | 1992 | 3073 |
| | 749 | 1993 | 3074 |
| | 750 | 1994 | 3075 |
| | 751 | 1995 | 3076 |
| | 752 | 1996 | 3077 |
| | 753 | 1997 | 3078 |
| | 754 | 1998 | 3079 |
| | 755 | 1999 | 3080 |
| | 756 | 2000 | 3081 |
| | 757 | 2001 | 3082 |
| | 758 | 2002 | 3083 |
| | 759 | 2003 | 3084 |
| | 760 | 2004 | 3085 |
| | 761 | 2005 | 3086 |
| | 762 | 2006 | 3087 |
| | 763 | 2007 | 3088 |
| | 764 | 2008 | 3089 |
| | 765 | 2009 | 3090 |
| | 766 | 2010 | 3091 |
| | 767 | 2011 | 3092 |
| | 768 | 2012 | 3093 |
| | 769 | 2013 | 3094 |
| | 770 | 2014 | 3095 |
| | 771 | 2015 | 3096 |
| | 772 | 2016 | 3097 |
| | 773 | 2017 | 3098 |
| | 774 | 2018 | 3099 |
| | 775 | 2019 | 3100 |
| | 776 | 2020 | 3101 |
| | 777 | 2021 | 3102 |
| | 778 | 2022 | 3103 |
| | 779 | 2023 | 3104 |
| | 780 | 2024 | 3105 |
| | 781 | 2025 | 3106 |
| | 782 | 2026 | 3107 |
| | 783 | 2027 | 3108 |
| | 784 | 2028 | 3109 |
| | 785 | 2029 | 3110 |
| | 786 | 2030 | 3111 |
| | 787 | 2031 | 3112 |
| | 788 | 2032 | 3113 |
| | 789 | 2033 | 3114 |
| | 790 | 2034 | 3115 |
| | 791 | 2035 | 3116 |
| | 792 | 2036 | 3117 |
| | 793 | 2037 | 3118 |
| | 794 | 2038 | 3119 |
| | 795 | 2039 | 3120 |
| | 796 | 2040 | 3121 |
| | 797 | 2041 | 3122 |
| | 798 | 2042 | 3123 |
| | 799 | 2043 | 3124 |
| | 800 | 2044 | 3125 |
| | 801 | 2045 | 3126 |
| | 802 | 2046 | 3127 |
| | 803 | 2047 | 3128 |
| | 804 | 2048 | 3129 |
| | 805 | 2049 | 3130 |
| | 806 | 2050 | 3131 |
| | 807 | 2051 | 3132 |
| | 808 | 2052 | 3133 |
| | 809 | 2053 | 3134 |
| | 810 | 2054 | 3135 |
| | 811 | 2055 | 3136 |
| | 812 | 2056 | 3137 |
| | 813 | 2057 | 3138 |
| | 814 | 2058 | 3139 |
| | 815 | 2059 | 3140 |
| | 816 | 2060 | 3141 |
| | 817 | 2061 | 3142 |
| | 818 | 2062 | 3143 |
| | 819 | 2063 | 3144 |
| | 820 | 2064 | 3145 |
| | 821 | 2065 | 3146 |
| | 822 | 2066 | 3147 |
| | 823 | 2067 | 3148 |
| | 824 | 2068 | 3149 |
| | 825 | 2069 | 3150 |
| | 826 | 2070 | 3151 |
| | 827 | 2071 | 3152 |
| | 828 | 2072 | 3153 |
| | 829 | 2073 | 3154 |
| | 830 | 2074 | 3155 |
| | 831 | 2075 | 3156 |
| | 832 | 2076 | 3157 |
| | 833 | 2077 | 3158 |
| | 834 | 2078 | 3159 |
| | 835 | 2079 | 3160 |
| | 836 | 2080 | 3161 |
| | 837 | 2081 | 3162 |
| | 838 | 2082 | 3163 |
| | 839 | 2083 | 3164 |
| | 840 | 2084 | 3165 |
| | 841 | 2085 | 3166 |
| | 842 | 2086 | 3167 |
| | 843 | 2087 | 3168 |
| | 844 | 2088 | 3169 |
| | 845 | 2089 | 3170 |
| | 846 | 2090 | 3171 |
| | 847 | 2091 | 3172 |
| | 848 | 2092 | 3173 |
| | 849 | 2093 | 3174 |
| | 850 | 2094 | 3175 |
| | 851 | 2095 | 3176 |
| | 852 | 2096 | 3177 |
| | 853 | 2097 | 3178 |
| | 854 | 2098 | 3179 |
| | 855 | 2099 | 3180 |
| | 856 | 21.00 | 3181 |
| | 857 | 2101 | 3182 |
| | 858 | 2102 | 3183 |
| | 859 | 2103 | 3184 |
| | 860 | 2104 | 3185 |
| | 861 | 2105 | 3186 |
| | 862 | 2106 | 3187 |
| | 863 | 2107 | 3188 |
| | 864 | 2108 | 3189 |
| | 865 | 2109 | 3190 |
| | 866 | 2110 | 3191 |
| | 867 | 2111 | 3192 |
| | 868 | 2112 | 3193 |
| | 869 | 2113 | 3194 |
| | 870 | 2114 | 3195 |
| | 871 | 2115 | 3196 |
| | 872 | 2116 | 3197 |
| | 873 | 2117 | 3198 |
| | 874 | 2118 | 3199 |
| | 875 | 2119 | 3200 |
| | 876 | 2120 | 3201 |
| | 877 | 2121 | 3202 |
| | 878 | 2122 | 3203 |
| | 879 | 2123 | 3204 |
| | 880 | 2124 | 3205 |
| | 881 | 2125 | 3206 |
| | 882 | 2126 | 3207 |
| | 883 | 2127 | 3208 |
| | 884 | 2128 | 3209 |
| | 885 | 2129 | 3210 |
| | 886 | 2130 | 3211 |
| | 887 | 2131 | 3212 |
| | 888 | 2132 | 3213 |
| | 889 | 2133 | 3214 |
| | 890 | 2134 | 3215 |
| | 891 | 2135 | 3216 |
| | 892 | 2136 | 3217 |
| | 893 | 2137 | 3218 |
| | 894 | 2138 | 3219 |
| | 895 | 2139 | 3220 |
| | 896 | 2140 | 3221 |
| | 897 | 2141 | 3222 |
| | 898 | 2142 | 3223 |
| | 899 | 2143 | 3224 |
| | 900 | 2144 | 3225 |
| | 901 | 2145 | 3226 |
| | 902 | 2146 | 3227 |
| | 903 | 2147 | 3228 |
| | 904 | 2148 | 3229 |
| | 905 | 2149 | 3230 |
| | 906 | 2150 | 3231 |
| | 907 | 2151 | 3232 |
| | 908 | 2152 | 3233 |
| | 909 | 2153 | 3234 |
| | 910 | 2154 | 3235 |
| | 911 | 2155 | 3236 |
| | 912 | 2156 | 3237 |
| | 913 | 2157 | 3238 |
| | 914 | 2158 | 3239 |
| | 915 | 2159 | 3240 |
| | 916 | 2160 | 3241 |
| | 917 | 2161 | 3242 |
| | 918 | 2162 | 3243 |
| | 919 | 2163 | 3244 |
| | 920 | 2164 | 3245 |
| | 921 | 2165 | 3246 |
| | 922 | 2166 | 3247 |
| | 923 | 2167 | 3248 |
| | 924 | 2168 | 3249 |
| | 925 | 2169 | 3250 |
| | 926 | 2170 | 3251 |
| | 927 | 2171 | 3252 |
| | 928 | 2172 | 3253 |
| | 929 | 2173 | 3254 |
| | 930 | 2174 | 3255 |
| | 931 | 2175 | 3256 |
| | 932 | 2176 | 3257 |
| | 933 | 2177 | 3258 |
| | 934 | 2178 | 3259 |
| | 935 | 2179 | 3260 |
| | 936 | 2180 | 3261 |
| | 937 | 2181 | 3262 |
| | 938 | 2182 | 3263 |
| | 939 | 2183 | 3264 |
| | 940 | 2184 | 3265 |
| | 941 | 2185 | 3266 |
| | 942 | 2186 | 3267 |
| | 943 | 2187 | 3268 |
| | 944 | 2188 | 3269 |
| | 945 | 2189 | 3270 |
| | 946 | 2190 | 3271 |
| | 947 | 2191 | 3272 |
| | 948 | 2192 | 3273 |
| | 949 | 2193 | 3274 |
| | 950 | 2194 | 3275 |
| | 951 | 2195 | 3276 |
| | 952 | 2196 | 3277 |
| | 953 | 2197 | 3278 |
| | 954 | 2198 | 3279 |
| | 955 | 2199 | 3280 |
| | 956 | 2200 | 3281 |
| | 957 | 2201 | 3282 |
| | 958 | 2202 | 3283 |
| | 959 | 2203 | 3284 |
| | 960 | 2204 | 3285 |
| | 961 | 2205 | 3286 |
| | 962 | 2206 | 3287 |
| | 963 | 2207 | 3288 |
| | 964 | 2208 | 3289 |
| | 965 | 2209 | 3290 |
| | 966 | 2210 | 3291 |
| | 967 | 2211 | 3292 |
| | 968 | 2212 | 3293 |
| | 969 | 2213 | 3294 |
| | 970 | 2214 | 3295 |
| | 971 | 2215 | 3296 |
| | 972 | 2216 | 3297 |
| | 973 | 2217 | 3298 |
| | 974 | 2218 | 3299 |
| | 975 | 2219 | 3300 |
| | 976 | 2220 | 3301 |
| | 977 | 2221 | 3302 |
| | 978 | 2222 | 3303 |
| | 979 | 2223 | 3304 |
| | 980 | 2224 | 3305 |
| | 981 | 2225 | 3306 |
| | 982 | 2226 | 3307 |
| | 983 | 2227 | 3308 |
| | 984 | 2228 | 3309 |
| | 985 | 2229 | 3310 |
| | 986 | 2230 | 3311 |
| | 987 | 2231 | 3312 |
| | 988 | 2232 | 3313 |
| | 989 | 2233 | 3314 |
| | 990 | 2234 | 3315 |
| | 991 | 2235 | 3316 |
| | 992 | 2236 | 3317 |
| | 993 | 2237 | 3318 |
| | 994 | 2238 | 3319 |
| | 995 | 2239 | 3320 |
| | 996 | 2240 | 3321 |
| | 997 | 2241 | 3322 |
| | 998 | 2242 | 3323 |
| | 999 | 2243 | 3324 |
| | 1000 | 2244 | 3325 |
| | 1001 | 2245 | 3326 |
| | 1002 | 2246 | 3327 |
| | 1003 | 2247 | 3328 |
| | 1004 | 2248 | 3329 |
| | 1005 | 2249 | 3330 |
| | 1006 | 2250 | 3331 |
| | 1007 | 2251 | 3332 |
| | 1008 | 2252 | 3333 |
| | 1009 | 2253 | 3334 |
| | 1010 | 2254 | 3335 |
| | 1011 | 2255 | 3336 |
| | 1012 | 2256 | 3337 |
| | 1013 | 2257 | 3338 |
| | 1014 | 2258 | 3339 |
| | 1015 | 2259 | 3340 |
| | 1016 | 2260 | 3341 |
| | 1017 | 2261 | 3342 |
| | 1018 | 2262 | 3343 |
| | 1019 | 2263 | 3344 |
| | 1020 | 2264 | 3345 |
| | 1021 | 2265 | 3346 |
| | 1022 | 2266 | 3347 |
| | 1023 | 2267 | 3348 |
| | 1024 | 2268 | 3349 |
| | 1025 | 2269 | 3350 |
| | 1026 | 2270 | 3351 |
| | 1027 | 2271 | 3352 |
| | 1028 | 2272 | 3353 |
| | 1029 | 2273 | 3354 |
| | 1030 | 2274 | 3355 |
| | 1031 | 2275 | 3356 |
| | 1032 | 2276 | 3357 |
| | 1033 | 2277 | 3358 |
| | 1034 | 2278 | 3359 |
| | 1035 | 2279 | 3360 |
| | 1036 | 2280 | 3361 |
| | 1037 | 2281 | 3362 |
| | 1038 | 2282 | 3363 |
| | 1039 | 2283 | 3364 |
| | 1040 | 2284 | 3365 |
| | 1041 | 2285 | 3366 |
| | 1042 | 2286 | 3367 |
| | 1043 | 2287 | 3368 |
| | 1044 | 2288 | 3369 |
| | 1045 | 2289 | 3370 |
| | 1046 | 2290 | 3371 |
| | 1047 | 2291 | 3372 |
| | 1048 | 2292 | 3373 |
| | 1049 | 2293 | 3374 |
| | 1050 | 2294 | 3375 |
| | 1051 | 2295 | 3376 |
| | 1052 | 2296 | 3377 |
| | 1053 | 2297 | 3378 |
| | 1054 | 2298 | 3379 |
| | 1055 | 2299 | 3380 |
| | 1056 | 2300 | 3381 |
| | 1057 | 2301 | 3382 |
| | 1058 | 2302 | 3383 |
| | 1059 | 2303 | 3384 |
| | 1060 | 2304 | 3385 |
| | 1061 | 2305 | 3386 |
| | 1062 | 2306 | 3387 |
| | 1063 | 2307 | 3388 |
| | 1064 | 2308 | 3389 |
| | 1065 | 2309 | 3390 |
| | 1066 | 2310 | 3391 |
| | 1067 | 2311 | 3392 |
| | 1068 | 2312 | 3393 |
| | 1069 | 2313 | 3394 |
| | 1070 | 2314 | 3395 |
| | 1071 | 2315 | 3396 |
| | 1072 | 2316 | 3397 |
| | 1073 | 2317 | 3398 |
| | 1074 | 2318 | 3399 |
| | 1075 | 2319 | 3400 |
| | 1076 | 2320 | 3401 |
| | 1077 | 2321 | 3402 |
| | 1078 | 2322 | 3403 |
| | 1079 | 2323 | 3404 |
| | 1080 | 2324 | 3405 |
| | 1081 | 2325 | 3406 |
| | 1082 | 2326 | 3407 |
| | 1083 | 2327 | 3408 |
| | 1084 | 2328 | 3409 |
| | 1085 | 2329 | 3410 |
| | 1086 | 2330 | 3411 |
| | 1087 | 2331 | 3412 |
| | 1088 | 2332 | 3413 |
| | 1089 | 2333 | 3414 |
| | 1090 | 2334 | 3415 |
| | 1091 | 2335 | 3416 |
| | 1092 | 2336 | 3417 |
| | 1093 | 2337 | 3418 |
| | 1094 | 2338 | 3419 |
| | 1095 | 2339 | 3420 |
| | 1096 | 2340 | 3421 |
| | 1097 | 2341 | 3422 |
| | 1098 | 2342 | 3423 |
| | 1099 | 2343 | 3424 |
| | 1100 | 2344 | 3425 |
| | 1101 | 2345 | 3426 |
| | 1102 | 2346 | 3427 |
| | 1103 | 2347 | 3428 |
| | 1104 | 2348 | 3429 |
| | 1105 | 2349 | 3430 |
| | 1106 | 2350 | 3431 |
| | 1107 | 2351 | 3432 |
| | 1108 | 2352 | 3433 |
| | 1109 | 2353 | 3434 |
| | 1110 | 2354 | 3435 |
| | 1111 | 2355 | 3436 |
| | 1112 | 2356 | 3437 |
| | 1113 | 2357 | 3438 |
| | 1114 | 2358 | 3439 |
| | 1115 | 2359 | 3440 |
| | 1116 | 2360 | 3441 |
| | 1117 | 2361 | 3442 |
| | 1118 | 2362 | 3443 |
| | 1119 | 2363 | 3444 |
| | 1120 | 2364 | 3445 |
| | 1121 | 2365 | 3446 |
| | 1122 | 2366 | 3447 |
| | 1123 | 2367 | 3448 |
| | 1124 | 2368 | 3449 |
| | 1125 | 2369 | 3450 |
| | 1126 | 2370 | 3451 |
| | 1127 | 2371 | 3452 |
| | 1128 | 2372 | 3453 |
| | 1129 | 2373 | 3454 |
| | 1130 | 2374 | 3455 |
| | 1131 | 2375 | 3456 |
| | 1132 | 2376 | 3457 |
| | 1133 | 2377 | 3458 |
| | 1134 | 2378 | 3459 |
| | 1135 | 2379 | 3460 |
| | 1136 | 2380 | 3461 |
| | 1137 | 2381 | 3462 |
| | 1138 | 2382 | 3463 |
| | 1139 | 2383 | 3464 |
| | 1140 | 2384 | 3465 |
| | 1141 | 2385 | 3466 |
| | 1142 | 2386 | 3467 |
| | 1143 | 2387 | 3468 |
| | 1144 | 2388 | 3469 |
| | 1145 | 2389 | 3470 |
| | 1146 | 2390 | 3471 |
| | 1147 | 2391 | 3472 |
| | 1148 | 2392 | 3473 |
| | 1149 | 2393 | 3474 |
| | 1150 | 2394 | 3475 |
| | 1151 | 2395 | 3476 |
| | 1152 | 2396 | 3477 |
| | 1153 | 2397 | 3478 |
| | 1154 | 2398 | 3479 |
| | 1155 | 2399 | 3480 |
| | 1156 | 2400 | 3481 |
| | 1157 | 2401 | 3482 |
| | 1158 | 2402 | 3483 |
| | 1159 | 2403 | 3484 |
| | 1160 | 2404 | 3485 |
| | 1161 | 2405 | 3486 |
| | 1162 | 2406 | 3487 |
| | 1163 | 2407 | 3488 |
| | 1164 | 2408 | 3489 |
| | 1165 | 2409 | 3490 |
| | 1166 | 2410 | 3491 |
| | 1167 | 2411 | 3492 |
| | 1168 | 2412 | 3493 |

Table 5:
LSR Protein
sequence
SEQ ID
NOs:
1169
1170
1171
1172
1173
1174
1175
1176
1177
1178
1179
1180
1181
1182
1183

The application's sequence listing, which the Patent Office published only in electronic form, follows.

SEQUENCE LISTING (3514 sequences)

SEQ ID NO: 1 - protein, 465 aa, synthetic construct
MKVAIYTRVSSYEQATEGYSIHEQERKLKAFCEVQNWNEFKVFTDAGVSGGSMNRPALKRIMDNLEYYDLVLVYKLDRLTRNVKDLLEMLETFEKYNVAFKSATEVFDTTTAIGKLFITMVGAMAEWERATIRERALFGSRAAVREGNYIREAPFCYDNVDGKLVPNKYKWIIDYLVEQFKHGVSGNEIARQMNVKKVNVPKVKKWNRTSIIRLMKNPVLRGHTKYGDMYIENTHEPVLSESDYKRIIDVIENKTHRSKVKHHAIFRGVLTCPQCHNKLHLYAGKITDKKGYSYEVRRYKCDTCSKDKNVQTISFNESEVEDKFIELLKTYDMNKFKVDIVEESTPKLDYDIDKIMKQREKLTRSWSLGYIEDDEYFSLMDETKEILDEVERAGTEVESTQTVTNEQLNMIDNILIKGWSKLNVEQKEELILSTVKEIVFDFVPRKYNENGKVNTLNIREITFKF

SEQ ID NO: 2 - protein, 555 aa, synthetic construct
MQPNLRYLACLRLSADSDGSTSIEWQRGVIRHHVSSPHLSGVLVGEAEDTDVSGSLSPFKRPKLGKWLTAKADEFDVIIAAKMDRLTRRSMHFNELLEWAQQNGKFIVCVEEGFDLSTPQGKMMARMTAVFAEAEWDTIQARILNGVQTRLENRSWLVGAPPTGYRIKTVEGGKRKILEIDQDFYPYVEEIFRRIREGQSTHRIARDFNGRSVLTWGDHLRKLKGEEPKGTQWQATIINKFIRSSWVPGLYTYKGEAVLDDQGDPVILPETPLATMDEWTDLVDRIKPAPKPEGATGGSRNSAKSLLSGVAHCGECGAPFTSLMDSGYKRKDGTKVPGHRRYRCSNKFKGGDCKNGSYVRADVLDSWVDQAIRDSIGQEDMYERAGKGPSQARELQETKARLAKLEADYESGKYDGEGQDESYWRMNKNLSAKVAHLAKQEAERANPTFKATGKKYGEVWEAKDQEDRRDFLRTYGVKVFVWGEGADKKDRGYAMNLGDIKTMAEELFPNRDRARFKLVHTHNAPEGYLSKIGIAVGLLKYGHPLEVKLRSPENS

SEQ ID NO: 3 - protein, 560 aa, synthetic construct
MAKKPKAKVYSYLRFSDPKQAAGSSADRQMEYAARWATEHDMQLDATLTLRDEGLSAFHQRHIKQGALGVFLRAIEDGRIQPGSVLIVEGLDRLSRAEPIQAQAQLAQIINAGITVVTASDGREYNRERLKAQPMDLVYSLLVMIRAHEESDTKSKRVKAAIRRQCEGWVAGTWRGIIRNGKDPHWVRLGEHGKFEHVPERVLAVRTMIDLFLEGHGAIEITRRLTEQNLYVSNAGNYSVHMYRIVRNQALIGEKRISVDGEEFRLDGYYPPILTREEFAELQQTMSERGRRKGKGEIPNIITGLSITVCGYCGRAMTTQNSKARAPKGKSVVRRLSCPMNSFNEGCPIGGSCESEIVERALMRYCSDQFNLSRLLEGDDGTARRTAQLAVARQRASDIEAQIQRVTDALLSDDGKAPAAFTRRARELETQLEEQRREIEALEHQIAASSAHGIPAAAEAWAQLVDGVLALDYDARMKARQLVADTFRKIVVYQRGFAPIDDAAADRWKRSGTIGLMLVTKRGGMRLLNVDRRTGCWQAEDDLDPSLIPSDGLPMLPLDA

SEQ ID NO: 4 - protein, 476 aa, synthetic construct
MKAVIYTRISKDREGAGLGVERQRADCAALADRLGWQVVGTFSDNDLSAYSGRHRPGYAAMCEALEAGEAQAIIAWHTDRLHRRPVELESFIGLCERRSIQVRTVRAGTLDLSTPSGQMVARMLGAAARHEIDHAIERQKRAKKQAALDGRYRGSRRAFGYERDGLTLCDAEADAIRTAAERVLSGTSLSQVARDWNAAGLRTAFGGKAFTSREVRRILLRPRNAGYSLHEGKRIPNAQWPPIITTDTFAALEALLRDPVRSKHLAFERKWMGSGVYLCGKCGAKISTASQKGTGKSWRPTYVCSASKHLGRVADTVDEYVTEAVLERLSRPDAPILLGGNKVDVADLTSRRDGYRARLDELAAMFAAGDIDAGQLKSGTTELRRKLDRVDAELAAARASSVLADLVLSGDDLRDTWAAIPPGGKGKVIDALMTVTIEPTRRGRRPGGSYFDPESVTIRFKGVGEHRLDDGQLIGA

SEQ ID NO: 5 - protein, 455 aa, synthetic construct
MASPPRNAALYLRISLDQTGEGLAIDRQREECERIAAQRGWTVVGVYEDRSISATQANKKRPGYEQLVSAYQAGQFDAMVCYDLDRLTRQPRQLEDWIEAAEGRGLALVTANGEADLTTDGGRMFARVKLAVARSEVERKSARQRTAAHQRASLGRPPLGTRLTGYTPKGETIPAEAEVIRRIFKLFQAGETLRSITRMLTEEGVTTRRGNAWNPSTIYGTLTNPRYAGRAVYQGKPTGQLGNWEPLVSPEVFDLIQARLADPRRKTNRVGTDRKHLGSGLYVCAVCEQPTTSWSQGRYRCKDSHVNRAQSQVDSYVLDTIAARLRRGDIATLLAPAKADLAPLLDDIERLTARQATIDADYDAGLIDGTRHAAATATVRAELIAVQQQMAAADKGSALGELLTSPDPAQAFLDAGLMTQRSAIDALAVVRLHRGHRYSRTFDPETVEVDWRRPR

SEQ ID NO: 6 - protein, 515 aa, synthetic construct
MSRPTGLTIDIYLRKSRKDLEEEKKASESGETYDTLERHRRTLFAVAKKERHNIANIYEEVVSGESVSERPQIQAMLRNLETSHIEGVLVMDLDRLGRGDMLDQGLLDRAFRYSGAKILTPTEVYDPESETWELVFGIKSLVAREELKAITRRMQRGRVASAGEGKSISKVPPYGYLRDENLRLYPDPETAWVVKKMFEMMRDGHGRIAVAQELDKLGIKPPNDKRRSWAPSSITAIIKNEVYLGTIIWGQVKYSKRNGKYKKTKLPRSKWTIKENAHEPIVSRELFEAANRAHTGRWRPSTNATKTLSNPLAGVLKCDVCGFTMLYQPRPNRPNDFIRCTQPTCQAVQKGATLALVEQHILDGLKQFAQELELQTEVPELDNDKDIAVKKSLVGNKQEEIAQLETQKSKLHDLLERGIYDVDTFLERQQNLNNRINGLQDDIRNIESEIKKEEVRNSSVLNLLPQLQTVISEYENADTESKNRLLKSVLEKATYLRKKEWTKRDQFIIQLYPKI

SEQ ID NO: 7 - protein, 486 aa, synthetic construct
MSRRRALAPVPDTPPRAVAYLRQSTYREESISLELQETACRDYAARHGYQIVAVEKDPGISGRTWNRPAVQRVMEMIESRDADVIVLWRWSRLSRNRKDWAIAADRVDVAGGRIESATEPNDTATAAGRFARGVMTELAAFESERISEQWKEVHTSRVARGLPPGGKLPWGWRWVDGAVRPDPETAPYIVEAYRRYLAGAGNRDLADWFNGSGVRPMHAKEWYFSTITQCLDSPIHAGLIAYHGQTLPGAHDGIIDVATWEAYRRERERRAGERQVKRRYLLSGIAHCPCGEPMLGFTQDKEGRPRTGRTRSPWSCYRCSSLGKPEGHGPWNISLRFVEPVVMDWLHQVAADVENKVPRAAARRDDAHRESQRIAREITALDAQLTALTGHLASGLVPEAAYVTTRDEILARRAELERGLAEAERLVLHVPDDPSAIAREALADWDTLPIETKRATLRQLIRTVLVDYEHRTAHVVPVWEPMHNEG

SEQ ID NO: 8 - protein, 542 aa, synthetic construct
MKTAYSYIRFSSSRQADGDSIRRQTELARAYAEEHELDLQDVSISDFGVSAFRGSNATEGALGAFLKLVDEQKIDSDCYLLVESFDRLSRQAVEDALALLLQVVNRGITLVTLSDNHVYKRGELDMTMLILSIVTMSRANEESEIKSQRTSAAWSKARIDALNGIKVKNSRLPDWLSWNEDKTDFVVNQPAKATIQRMFELSAGGSGIEIIAKTLNSEGLKTFKQFKEWRSSGVSKLLRNRAIVGEFQFYRKDAKGNRVAVGEPIAGYYPEVVSKQLFLTVQQGMDLRNRRGSGNRAGQFTNLFTGLIRCGECGSAVVTSSQTTKTPQGYLKCTMRCESKARMNYKYTEPQVLSALGSLQSVIEKYRTPISDETASIELDVRALDEKVTTFESLLDNAFTPKLAERLQEAELQLANAKALLESERQRVSAEQSREQIVLGLEPLESTDDRRAFNSKLRTVIDRIEMIEHPHEKGSALVYFINDCPVMEQHFTKLKGAHGTSSEVYELHSDDVPSHLGRTTSKKPLEFIIEESGDVLSFMPAQ

SEQ ID NO: 9 - protein, 562 aa, synthetic construct
MEKRKLYSYIRWSSDKQAKGSSLQRQLETARRVAHENDLELVEIIDAGLSAFRSKHLEKGSLGAFIEAVKVGQIASDSWLTVESLDRISRDAILKAQGLFMELLELGITIYTGMDNRIYTKSSVTDNPMELMLSIMTFSRANQESMVKSQRQKSATQLKINKFNASVRADNGYPHAIRNSGANVFWSDVSDGTVRPHEYYFPIAKLIVSLRLKGWGYMRIAKHLNENYTPPKGTAKRKHFKDLWSPKLICNFLQSRTLMGEKSIRVDGVEHILKGYYPQVISENEFYSLQNVINRKLANEPNNYIPLLTGIRRFKCGCGAAMVAFFQYDKIRYRCDGMKSLDKRMHCGAKSFNGASIENAIVQICADKIFKDVKTHTSNVGAIQAMLVEAKRKYNRGMDMLLEDTAPQGLNIKLIELEKQIEELQKKLNDELVTEAGVNSSVSWGAVPKDYRDVFNTERLEIKQKIQASTLSIVCTTIKTKGHLFEIKFNDGDVIRFFSDKRRVHVDVHSINNAEIMQSEGIILHDHLDYLVGPEEFIERIRQKHLQMKALQERTLDDIFDI

SEQ ID NO: 10 - protein, 515 aa, synthetic construct
MKTAIYLRKSRADLEAEARGEGETLAKHRSTLLKIAKEMNLNVLSVREEIVSGESLVKRPEMLALLEEIEDNKYDVVLCMDMDRLGRGGMKEQGIILETFKRSNTKIMTPRKTYDLNDEWDEEYSEFEAFMARKELKIITRRMQRGRVASVEAGNYLGTHAPFGYDIHRLNKRERTLTINPEEASIVRMIFDWYANEDMGANAIRSKLNDLGYKSKLGNEWNPYSILDILKNNVYIGKVTWQKRKEVKRPDAVKRSCARQDKSDWIIADGKHEPIIPESLFEQVQEKLNSRYHIPYNTNGIKNPLAGIIKCAKCGYSMVQRYPKNRKETMDCKHRGCENKSSYTELIEKRLLEALKEWYINYKADFEKHKQDDKLKETQVIQMNEAALRKLEKELVDVQKQKNNLHDLLERGVYTVDMFLERSNVVSDRITEITSTMENLKKEIKTEIKKEKVKKDTIPQVEHVLDLYFKTDDPKKKNSLLKSVLEKAVYKKEKWQRLDDFELVLYPKLPQDGDI

SEQ ID NO: 11 - protein, 605 aa, synthetic construct
MPESPPRALIVIRLSKVTDATTSPERQLAECRAICEKRGYEVVGVAEDLDVSGAVDPFDRKKRPHLARWLHGEHLDDNGEPVPFEVIVVYRVDRLTRSVRHLQKLVAWADDHKKLVVSATEAHFDTSLPFSAVLIALIGTVAEMELAGISERNASAARHNIQAGRYRGSTPPWGYVPSNDTGEWRLVRDKEQADVINEVARRVIEGEPLQKIAHDLTRRGILTPKDNFAKQRGREIKGREWSVTQLKRSLLSEAMLGHAVSGGAAVRNDDGSPVVRSEPILSREIYDRVAAELSSRAKRGEPNKRTSSLLLGVISCGNPCLHKQQGHECPEGCSGTCDEPVYKFNGGSHSQFPRYRCRTMTRAYKCGNRTIRADQADAQVERTILALLGSSERLERVWDAGEDHSAELADINDELVDLTSQLGVGAFRAGTPQRAKLDARIASLAERQAQLSSEAVVPAGWKLLPTGELFGDWWSRQDLTARNVWLRSMGVRARFKRDDKTLYIDLGNLNDLISGLKPGGTAQRVRGGLQAMERNGIQGMVFSDADSEVMPAPAAGYMWIQPVEGVWVYTSEALLAAAAERQALRREKIEDEFAYGPGDFDEDWD

SEQ ID NO: 12 - protein, 477 aa, synthetic construct
MRDSKSKTVIIYNRVSTIMQDKNESLTEQTDECIRYCKTNGYEIYKILKDVKSGTKDDRAGYLELKKHIRRRDFDILVVLETSRIARKMKELVLFFSLLNENNIEYISIREPNYNTTTPDGKFAMNIRLGLIQFERDNTAERVTDRLYFKASKGQWVNGKPPIGYKLVNKRLEIDEEKAEIVKNIYEDFLNGYSLNQINNKLQFSWGSKQVKRILTNPTYKGYIRYGTRSNRKKNNREAFIVKGWHEAIIPEDKWEKVQEMYKSLNRKASNTKPTLLSGLLKCKECGNNYIRKRGGSYDKNLYYGCNLNNLRYSDKFFYKDIPECSSATIKGDLLEKAVIDTLKKQINDLNFNDIEIDKKRQVNIKQIDSSINKFKNRLNKIYELYIEDEIPKDKYLKDKKDIEARIISLEKQKKSFGEIEVEKSNNEMIQEYFSKIDLSNIEEANRILKIIVNKIVVYKKKKTPKDDFEVEIYLNI

SEQ ID NO: 13 - protein, 550 aa, synthetic construct
MAAKSRVYSYLRFSDPKQAAGGSIDRQLEYAARWAADREMELDASLSLRDEGLSAYHQRHVRQGALGVFLRAIEDGQVPAGSVLVVEGLDRLSRAEPLQAQAQLAQIVNAGITVVTASDGREYNRERLKAQPMDLVYSLLVMIRAHEESDTKSKRVKAAIRRQCEGWIAGTWRAPIRVGKDPHWVRETEGGGFELAADRASAVRLVIEMFRQGHGAVRIVRELAERGLQISETGRTHSSNIYKILANRMLIGEKSVEVDGETYQLDNYYPALLTPAEFADLRYLAEQRGRRKGKGEIPGVVTGLGITYCGYCSAAIVAQNLMGRKRLPDGRPYPGHRRLHCVTYSQSVGCKISGSCSVVPVERALMLYCSDQMNLTRLLEGDAGTASISAQLASARQRVAELEAQIRRVTDALLFDDGDAPAAVLRRVRELESQLASERRDVESFEHHLAASASNVAPAAADAWRELVQGVEQLDYDARLMARQLVADTFSRIVIYQSGFQPETDHGTIGVVLVGKRGNTRMLNVDRRTGEWRSAEDIELSGLATIPLPA

SEQ ID NO: 14 - protein, 472 aa, synthetic construct
MRVLGRVRLSRLTEESTSVERQRELIKKWSEMNDHTIVGWAEDVDVSGSIDPFEAPELGPWFQEDKRGDWDILVAWKLDRIGRRAIPLNKVFGWMLEHEKTLVCVSDNIDLSTWVGRLVANVIAGVAEGELEAIRERTKASRKKLLESGRWTGGPVPYWLIPEKLPEGGWVLSLNTETAPILRRAIDEVLDGTAVHTVAERLNDQGVPSPGGKKWTSQTLWRILQHKYLKGHSTDRGKTVRDSSGVPISNCEALLTPSEWDRLQAVLTQWKLPETSNRVKNTSPLLGVVVCYICDKPLYYRSYTRNYGKGLYRSYYCRNHRTPGIKADMLDEYLEENLMREVGDKNVLERYFVPAENHQIELDEAIRATEELTALLGTMTSATMRSSLTAQLAALDSRIASLEKLPTSESRWEYRELPRTYREMWESDDDPQFRRELLLKSGITLAATMTGGQKLHLHIPDDILERMALKGE

SEQ ID NO: 15 - protein, 612 aa, synthetic construct
MESASPGLRVLGRLRLSRLTDESTSIARQRETIQRWAEIQGHTVIGWAEDADVSGAVDPFDTPQLGQWLNHRVEDYDVIAAWKLDRLGRNAIQLNKLFGWCIDHNKTLVSCSESIDLGSWSGRMLAGVIAGLAEGELEAIRERARSSRVKLREAARFAGGKPPFGYRKVRRDGGGWMLEIDEPAAELVGKIVADVLDGKPVSRVVMALNEGGYRTPRDYYETVKAGKPALKLAAGERRNSEWRSTALRNLLTNPALRGYVHHKGQIARGDDGMPLQLAEEPLVDADEWEGLQAIFNGHRERRSHYRRPDASPLVGLVYCYWCHSPLWHNRNVSRGHEYFYYRCPNIQKHERASMIPADQAEKAVADSFLDQAGDLPVMERVWVPGDSTERELRDAVAALDELTEVLGTLGSATARQRITRQITALDERIRDLEAQPVREARWEYKQLGGTYREAWESLGEAERWQLIMKSGMTFAFGLTDRGRGPNSVWVSSVYTPEPLKQTLVSGVTQRRTLADADPHRDVNSADHTKSLPEHWATMRKHGVEGIEVHEVKSVFVSKPGERVEIPHWLHEVGISEITNDDDVRIIWTQDGRGWYQHSDGEWIEVPLGELEE

SEQ ID NO: 16 - protein, 509 aa, synthetic construct
MLRIAIYSRKSVETDTGESIQNQIKLCKEYFKRQDPNCIFEIFEDEGYSGGNINRPSFQRMMELVKIKQFDIVAVYKIDRIARNIVDFVNTYDELDNIGVKLVSITEGFDPSTPAGKMMMLLLASFAEMERMNIAQRVKDNMRELAKMGRWSGGTPPKGYTTKKVIENGKKITYLDLIDDEAYIIKDAFKLYAEGYSTYKINKHFKEKGIRLPQKTIQNMLNNPTYLISSKESVDFLKNKGYTVYGEPNGFGFLPYNRRPRTKGKKSWNDKSQFVGVSKHEGIIDLPLWIEVQNKLKERTVDPHPRESNFTFLSGGLLKCSCGSSMFVHPGHTRKDGSRLYYFRCMKNNGNCSNSKFLRVDYAESSILEFLESISSKEKLTEYQKKKKPRLDFSIEIKNLNKKIRDNSKAIDNLIDKLMILSNEAGKVVATKIEELTKQNNILKESLLEIERKKLLSGLEDNNLNILYNEIQNFIQTEDISLRRLKIKNIIKYITYNPQNDSLQVELVD

SEQ ID NO: 17 - protein, 497 aa, synthetic construct
MNAIYARQSVDRADSISIESQIEFCQYEMRGEQYKVYTDRGYSGKNTDRPAFAEMMNDIENGVIGKVVVYKLDRISRSILDFSNMMEQFGKHKVEFVSTTEKFDTSSPMGRAMLNICIVFAQLERETIQKRVADAYYSRSQKSFYMGGRVPYGFRLIPTTIEGIKTSMYEINAEEAEQVQLIYELYSKPECSYGDIIRYFQAHGILKNGKPWGRTRLADILRNPIYVRADPSVYAFYRDQGAIMANDPADFIGTNGCYYYKGQDSAGRKQMNLEGNHLVLAPHEGIISSDLWLKCRVKCLEAQQIKPYQKAKNTWLAGKIKCGACGYALVDKHYSTTRSRYLLCSNKMNAKACEGPGTIYTDEFEQIIYNEMQKKMAQFKKLRRCKGKRVNPELTALNIQLTQVETEISSLMDRLSAADDTLFRYISGRIKELDGKKQELMKRISERKLHKEADYTEINNHLTMWDELSFDDKRQTVDQLIRVIYATSDSIKIEWRI

SEQ ID NO: 18 - protein, 507 aa, synthetic construct
MGRSVITYLRYSSAIQGAEGADSTRRQNDLFKQWLKKNSDAQVVASFSDEGLSGYKGKHLTGQFGDMLARIESGEFPEGTILLVESIDRIGRLEHLETEALMNRILGNGIEIHTLQDGLIYTKDALADDLGISIIQRVKAYIAHQESKQKSFRVSQKWEQRAKLALAGEQRLTKMVPGWIDPDTFKLNEHAETVRLIFKLLLDGESLHNIARHLQSNGIKSFSRRKDANGFSVHSVRTILRSETTIGTLPASQRNDRPAIPNYYEAAIDAATFNKAQEVLDKNRKGRTPASDNPLTINIFKGLFRCQCGASVHPTGTKNKYAGVYRCNNHLDGRCDVPPLKRKPFDKWVLENFLGMIDVGNDGESERKIAALQHEVEIVTARIKKATALLLEMDDIDELKIQLKELNQKRTELQTTIDSMRRKASLTDKELPQLKDIDLTTKAGRVECQLILSKHLKGLTLGKDSVTVTLQNDTEITIPTNPLPLNDGSPIFEIADKELLDIDAYQL

SEQ ID NO: 19 - protein, 548 aa, synthetic construct
MGKLLVTYIRWSTKEQDSGDSLRRQTNLIDAFYSKHKNDYYLLPAHRYVDKGKSGFHQQHKAQGSDFRRMFENVMSGAIPEGSLIVVENFDRFSRADIDTAIDDVRQILRKGVSILTLGDGELYDKSALTDPVKLIKHIIIAERAHQESLVKQKRIAQVWNHKTQLARELKKPMGKQAPGWLELSEDGSHYIVDEDKASLVNIIYDKRLSGMSMFAICKWLNEQGYPTINQRKVRISKTKKPDGNWSALSVKHILTSRSVLGYLPAKISTEDRKTVLREEIEGFYPQIVTDSKFYAVQQLLEETGKGKTSSGEHWLYVNILKGLIRCKCGLVMTPTGIRKPVYQGTYRCNGNKESRCSYGTVSRKLLDTQLCSRLFSKLSQLHDEATDTAKLDELQRRLNTVDSELEKLTETLIQLPNITQIQEALRVKQEEKDELIVQLSREKARVKSVSSLDLSGLDMESVEGRTEAQIIIKRLVKEIVVSGNEKLVDIYLHNGNMIRGFPLDGKDDHTLTLEEATDEMQSLDDMLIFGEPVTRIYPAGDMEEVDA

SEQ ID NO: 20 - protein, 500 aa, synthetic construct
MGKQNGKAYSYIRFSSKKQEQGDSVRRQIALAEHYAHANNLILSDKNFQDLGISAFKEGNRPSLGDMLEAIEQGQIEQGSTIIIESLDRLSRRGIDVTQQIIKSILQKNVFIASLVDGLLLNRDSVNDLVSVIRIALAADLAYKESEKKSKRLRETKGQQRQRALKGEVINKILPFWLERKQNKYIFSNRLATVKRIIELRQKGLGTNKIAKILNEEGHKPLRSKGWNHTTIGKTINSVALYGAYQTSETTQDRKVILLDIVENYYPAVISKEEFMLLQSDHKQNKPGYKSEHNAFAGLLKHECGGALVRKFHVASGKTYQYHVCANARDGKCNVTKNFKNIEVALYQIMKELKLEKKTSFDKTLLEERNSVKTKIQELNNMLLELPKVPLSVLQTINNLEEKLQELEEKIKHQDNIIASEKTFNINTLRETKDPQQLNMMLKRVIENIIVFNIEKRWRIKILYRNKHSQSFIWDGSNITFVSDTKKLLELVKHTPEESK

SEQ ID NO: 21 - protein, 507 aa, synthetic construct
MGRGVITYLRYSSAIQGAEGADSTRRQNDLFKQWLKKNSDAQVVASFNDEGLSGYKGKHLSGQFGDMLSRIESGEFPEGTILLVEAIDRIGRLEHLETEALMNRIIAHGIEIHTLQDGLIYTRDALSDDLGISIIQRVKSYIAHQESKQKSFRVSQKWEQRAKLALAGEQRLTRNVPGWIDPETFKLNEHAETVRLIFKLLLDGESLHNIARHLQANNISSFSRRKDANGFSVHSVRTILRSETTIGTLPASQRNDRPAILNYYEAAIDASTFNKAQEILSKNRKGRTPASDNPLTINIFKGLFRCQCGASVHPTGTKNKYAGVYRCNNHLDGRCDVPPLKRKPFDKWMIDNFLGMIDVVSDGESERKIAALQHEVETVTARIKKATALLLEMDDITELKAQVKELNQKRTELQTTIDTLKRKTSLTDKELPQLKDIDLTTKVGRVECQLILSKHLKGLTLGKDSVTVTLQNDTEIIIPTDPLPLNDGTSILEIAEKELLGIDVYQL

SEQ ID NO: 22 - protein, 510 aa, synthetic construct
MGRRAISYIRFSSERQLKGDSVRRQSKLVTDWLDKNPEFYLDSSLSFKDLGKSAFSGKHLKGGLGDFLTAIEKGLVKAGDTLLIESLDRLSRQDIDIASELLRRILRAGVDIVTLSDGEHYTRESLKDPLSLIKSILIMQRAHEESLRKSERVQAAWNRKKELISEGIKVSRRCPAWLRLNDDRRTFTIIPDKVEVVKRAFDLRLQGLSFWAITRTLNDEGHLSLNQYTPKQKGWSDTAVKKLLRNRAVIGCFTPAGREEVQGYYPAIISESLFYRVQQLNTGQYGRASVSSNPLSVNLFRGIIKCSECGATIVLGGYALKRFGMYRCPNRSANRCSAKAISRKQTDTTILYMLALCDRFETENTDTIDSLKLQREDLQRKISKMAELAIELDDMTIITEKLRDMKNALSKLNHDIEEETKRIKAITTGSLKDIDRTTKEGMIETQLLIKGVLKEIVIDAAKRRCKVTFHNGKVIDLSITENPSEDVTEAIQSLSEVTERGLIDVDEVII

SEQ ID NO: 23 - protein, 449 aa, synthetic construct
MGRTGLYVRVSTAEQEKHGYSIKVQLEKLRAFASAKDYTVVKEYIDAAQSGAKLERPGLKQLIEDVENNALDCVLVYRLDRLSRSQKDTMYLIEDVFLKNSVAFVSLQESFDTTSSFGRAMIGMLSVFAQLERDNITERLFSGRAHRAKRGFHHGGGIIPFGYRYDVETGELKRFENESNEVKAMFEMIANGKSVSSVAKEFNTYDTTIRRRIANSVYIGKIQFDGETFDGQHEPIISKELFDKANVRMNARASNLPFKRTYLLSGLIYCGKCGERCSAYESRSKHNDKEYRRAYYRCNARTWKYKQKHGRTCEQPHIRVDELEQAVMEQVKRLPLKHKVKKRAFDFKPVENKIATIDKQKERLLDLYLNEHLDNEMFNKKSKELDKSRDKLAKQLERMRMQAADSVESYQWLDGIDWDALDKDTLREVLERIIERIVIRDKDVEIYFK

SEQ ID NO: 24 - protein, 451 aa, synthetic construct
MGKRVALYMRVSTEQQAKHGDSLREQKETLYEYIEQHKDLKVVNEYVDGGISGQKINRDEFQKLLQDVKENKIDLILFTKLDRWFRNLRHYLNTQEILEKHNVSWNAVSQQYYDTTTAYGRTFIAQVMSFAELEAQIDSERIKAVMANKIAQGEVVSGKTPLGYSIENKKLVINDDAPIVIDIFNYFLSSGSLRKTVYYLGSQYGIVRDYQSVKNMLTNKKYIGELRNNKNYCPPIIDKKLFYAVQKALPKNLKTNAKRDYIFKGLLKCSDCQGSVAGQTIKARYKKKDGTESIYERTCYRCVKRRNNKLRCTNKRAFYEKNLERYIFEATKQKFEQIQINYSKKQPKIIKKKNSKKNIENKLDRLKKAYLNEVIDLEEYKKDREALMKELNEIEVEPAKIDIKNVEFILSKEFDEIYKESSEEEKNALWRSIIDNIIVFPDGNITVNFLI

SEQ ID NO: 25 - protein, 645 aa, synthetic construct
MGLRPICYERVSSIQQIEGGGGLDDQRSALEGYLDRNSDKFSNDRIFIQDRGVSAFKNSNISSESQLGIFLQDVQNRKYGEGDALIVMSLDRISRRSSWAEDTIRFIVNSGIEVHDISASTVLRKDDPHSKLIMELIQMRSHNESLMKSVRAKAAWDRKIIEAVQNGTVISNKMPMWLKNVDNRYQVIQEKADLIIRCFEWYRDGFSTGEIVKRIADPKWQMVTVSRLVRDRRLLGEHKRYNDEIIHNVYPKVIDDDLFLTANRMMDRVMLEKNKPAEDLLLESDVVQEIFQLYESGLGSGAIVKRLPKGWSTVNVLRVLRDKNVVTQKIIDNLTFERVNQKLSMNGVANRIRKDITIAQDDYITNLFPKILKCGCCGGNIAIHYNHVRTKYVICRNREERKICDAKSIQYIRIEKNILKCVKNVDFQKLMIESTGSETSVLDGLREELSSLRREESSYNDKINERKLAGKRVGIHLNDGLTEVQDRIEEIEKEIISAQTVREIPKFDFDMDEVLDPMNIELRAKVRKQLRLVLKAVKYWMFDKRIFIQLEYFNDVLSHMLVIDNKRGGGEVMYEMSIEEKKGERIYTVHENGYAVFIASVTIGTELWSLALSRTRTIDSVGNYLSLLAREGFEIFVNEDQIDWF

SEQ ID NO: 26 - protein, 531 aa, synthetic construct
MGRQVITYLRFSSKPQERGDSIRRQKGLFERWLKDNPDAKVVDEFSDEGASAYHGHHLKGDFGRMLQNIQDGKYLSGQTVLLVESETRLNRQKARNTENLVDLITGKGVDVICLESGKIYTSTNIDDLDTSIQLKIAAHIAHQQSKEKSIKVSAAWEHRAQLALEGKQQLTKNVPGWIDPDTRKLNEHSSTVVTIFDLLLSGESLHNIARYLQANNIKSFSRREKANGFSVHSVRTILRSESTVGTLAASKRNDRPAIPNYYEPAIDVATFNKAQEILSKNRVGRAPASDNPITINLFKGIIRCQCGASVHPTGVKATYQGVYRCNNVPDGRCNVPTIKRKPFDKWMLDNIVGFLERDDGNNTDKRKAEIEYQISLVTSKLKKATTLLLELDDVTELKEQVKELNIQRSNLQSELDELNQRETLSDKPLHHLSEIDLTTKAGRVEAQLILSKFVQSIELQREMIIITLRNGTVIGKSRDLSPVLSQDLMKQVVSSPSPTDIDMFSVITSDEEFRKSGKQVTKRSSEQIDNO

SEQ ID NO: 27 - protein, 540 aa, synthetic construct
MGPKAISYIRFSTKIQSVGDSTKRQSKYINDWLKRNPDYYLDESLRFQDLGISGFSGANAKSGAFGEFLAAVESGYIEAGSVLLVESLDRVSRQDIDTAGEQLRKILRSGVEVVTLVDNEWYTKESLKDSLSMIKAMLVMERAHEESAMKSTRLRSVWAAKRERAAKGEIMSKRCAAWLKVSEDRSRFEFIPENVKAVQRVFQLRLEGLSHVKIAKQMNDEGFSTLNQFKSVTGGWSQSSVTELLSNRSVIGFKVPSKSMAVKGVSEIPNYYPSIITDEQFYSVQQLKQGSGRKPSSDLPLLTNLFKGVLRCSECGFIVVVAGVSAKRSGIYKCSMKSEGRCNSVGFSRLQTDRALVQGLLYNTNRLSLNRDNGSAIGTLQSELEQLQKQRERLIKLAMLADDTESMAKDLKALNSQIKDAEKAVSEVHQREQSSQLETISHLDLTVKKDRIESQIIIKRIVKEIRLNTAGKKCDVFLHNGLKLYNFPLDRVVDGAQWLEILPLIDGDEFDFEGFTTKPRHIALEEAPEWVKEMEEQPKQ

SEQ ID NO: 28 - protein, 600 aa, synthetic construct
MGKKIIPYGYLRVSSLEQVRSGGGLEAQDEEVRRYITQKSDVFDIDKMVMMSDEGLSAYSGRNIKEGELGRFLADVDAGLIPAGSALVCYSVDRLSRQNPWVGTQLISTLIGAGIEIHSVAENQILRSDDPVGAIMSTIYLMRANNESVIKSERAKHGYTKRLNESIANNKVLTRQMPRWLYDNDGKYAIDPNMQKVIDFTFDSYIAGQSTGYIAKKLNDMGLKYGDTSWRGSYVAKLIRDERLIGKHIRYSKQIKGVKREIIETIPDFYPVTIDTDKFHIANNMLTSVAKNIRGRTRMTYGDISILRNLFNGVIKCGVCSGETSVVQNTRRKITNGVVTYVPYKTFLRCRNRYELKTCTQGDIRYEVIERAILNHLMGLDITTLLAAPVDNKIERYRTELELCKAEEEELQAIIKERENEGKRPRPQTLKSYEDVADRIDELTQLIESHVEDNFIPHFNVDLDSITDVSNVSERSLIKKGIATIADSICYKRISDFILVEIKYRNLNDKHVLVIDNKNSEMVVNFSIEYNEENKVYICNSFVMEYDNLSCEFTVSKTTMEDYAHMMNFVDYVSDDESYNAKEFLVKNFTHIKFIDKSNE

SEQ ID NO: 29 - protein, 526 aa, synthetic construct
MGPSAFSYVRFSSGKQAKGSSEHRQRAMLGQWLEQHPSFTLSDLRFEDLGRSGFSGEHLDHGLGQLLAAIDSGAIKSGDVILVEAVDRIGRLEPLEMLPLFSRIVKAGVSVITLEDGHVYDRSSVNETSLFLLVAKIQQAHEYSNRLSRRINASYTARREKAKAGLGIKRETPVWLTTDGQLVPHVAPHIAQAFQDYADGLGERRICRKLRESGLEEFSKTNATTVRRWLKNRTAIGYWNDIPDVYPHVVDPALFYQVQQRLDAPKVDRAKPSAHYLTGLVKCAVCGRNYNYKQRKHTDPAMLCTSRARLAGEGCSNSKTYPVIVLDQVRKLTSLPFLQHAMESASSQADPSSQRLAVIDGEIGELSRKISEATKALLVLGFTPEIQESLEQLKTAREALEEERATLLLPQAEKLTTAQLEAFSNGLLDDEPMKLNHVLQTAGYSMVVHPDGSIDVDGKRFVYEGASRKEKVYKLRLIGEDKQWSLPILTPQMATYKSLFMAAVRLPGDPSEEELRRFEEAKHSER

SEQ ID NO: 30 - protein, 552 aa, synthetic construct
MGPTAYAYIRYSSKAQGEAGRDSVDRQMASIQAITKQQGIELRTENIFSDTGISGFDGSNKNKGKLKDLIDLIISQKIQDGDFVFVESIDRLSRQKMRLSKDLVYTILDRGVTLVTTIDGQMYSRAKDGMEQDIMLSVIAQRAHEESKTKSVRRKSAWNRAKKLADEEKEIFNGHNPPYGISFNKEESRFEIVEEEAQEIRDIFESLKYVGVSLTIKKVNEYSKRKWTNRNIKHLLDTKYVLGSYMAQRRDENKKKVFERYIENYYPQIVSFELFNEAVASMKNRAHRKHYGNQTVGSLNIFRHSIKCSNCNASMLFEKQTNPKGVVYPYFQCFTRKELKNGCDQPRFRFDLAFGVFLELVKFATTSSETINPNDWNNEITSVGSFHKTLFKLLTSTEKDKELEKKISHVKNLLLEQKNYQDNINKSFEAFTDGIIPAAFIKKASETEIKIEALERELAELNIESSTRNVSLLVHSYNDIIDLYKTEAGRLKINSFFTSNNIAFSFSFDQKTRMLRCKVYYKDIHVDVINKKFPLHNPLKEFGIDNLNQYFN

SEQ ID NO: 31 - protein, 462 aa, synthetic construct
MGKVAIYTRVSTLEQKEKGHSIEEQERKLRAYSDINDWKIHKVYTDAGYSGAKKDRPALQEMLNEIDNFDLVLVYKLDRLTRSVKDLLEILELFENKNVLFRSATEVYDTTSAMGRLFVTLVGAMAEWERTTIQERTAMGRRASARKGLAKTVPPFYYDRVNDKFVPNEYKKVLRFAVEEAKKGTSLREITIKLNNSKYKAPLGKNWHRSVIGNALTSPVARGHLVFGDIFVENTHEAIISEEEYEEIKLRISEKTNSTIVKHNAIFRSKLLCPNCNQKLTLNTVKHTPKNKEVWYSKLYFCSNCKNTKNKNACNIDEGEVLKQFYNYLKQFDLTSYKIENQPKEIEDVGIDIEKLRKERARCQTLFIEGMMDKDEAFPIISRIDKEIHEYEKRKDNDKGKTFNYEKIKNFKYSLLNGWELMEDELKTEFIKMAIKNIHFEYVKGIKGKRQNSLKITGIEFY

SEQ ID NO: 32 - protein, 464 aa, synthetic construct
MGKVAIYTRVSSAEQANEGYSIHEQKRKLISFCEVNDWDRYEVFSDPGVSGGSMKRPSLQKLFDRLEEFDLVLVYKLDRLTRNVRDLLEMLEVFEKNNIAFKSATELFDTTSAIGKLFITMVGAMAEWERETIRERSLIGARAAVRSGKYIKVQPFCYDLVDQKLKPNQYAEYIRFIVDKLLSGKSANEVVRLLESKKKPPGITKWNRKTVLGWMRNPILRGHTKHGDLLIKNTHEPIISEDEHSKMLDIIDKRTHKSKTKHNSIFRGVIECPQCQNKLYLVSSIQKRANGGSYEVRRYTCATCHKNKEVKDVSFNESEIEREFINTLLKKGTDNFMVNIPKPKDYDIENNKEKILEQRANYTRAWSLGYIKDEEYFVLMDETDKLLKDIEEKESPRINIELNEQQIRSVKNLLIKGFKMATAENKEELITSTVDLIKIDFIPRRLNKEGNINTVKINEIHFKY

SEQ ID NO: 33 - protein, 562 aa, synthetic construct
MPKAISYIRFSTGRQSLGSSHERQRQAVTRWLEKHPDYTLYDKPYDDLGRSGYSGDHVDNAFGHLLAAIEDGTIPKGSTILIEQIDRVGRMEPFEMFPLLSRIVNAGVDLVTLDDGITYNRQSVNNNHLFLLVAKVQAAWGYSKTLSERTKASYAIRREKAKNGEPIKRFAVAWLTTDGKLKSHLVPYVKQVFDLYISGVGKNTIANRLRASGMPELASISSPTIDAWLQNKTAIGFWNDIPGVYKPVVTPEVFMQAQKRRQEVKTQSRSRTSKNFLVGMVKCGVCNANYIIHNKEGKPNNMRCLTHHRLKDAGCTNSETIPYQVVHFIYLSSAPSWIDKAMKVIQLTDNEKRKLYLVTEREELTASILRMAKLLARTDSPELESEFDLANERRASIDIELSVLDRKADNGVESKSTSIFVGYEATLEHDRLAFHDPIQLSALLKQAGYSITVQPGRKLYVAESNVPWVYTGVARKGNTALGYRIQDGEMEYTISNVIPEAVDVQAYKNNPDGEMQHVADRSYKHVKSPTLLNPTGLRNTNVMTIEKFESANAAMQRLTSGV

SEQ ID NO: 34 - protein, 497 aa, synthetic construct
MKAVAYIRISSSEQEYKRQHEELSELARFKNLNLVKVFADVVSGSKTKAKERASFEIMDKYLLDNSDVKNLLILETSRLGRKKLDVLNTIEDFFLRGVNIHIKDLNLCTMENGKRSITTDILVSLLSIMADEETRLLSERIKSGKMSKAKENKAFGAKVIGYKKGKDGTPIIDEKEAPIIKRIFELASQGLGMRKISSIIESEFNREFAIGTLSSIIKNSFHKGKRKYKDLILDVPPIVSKGLWQKANDSINSRSKFGSRKYVNTNVVQGKIKCGVCNSVMYQKVIPKGRINSFVCKDTKCKNSINRPWLFRMIRLIVDKHALKNKDEKVREKIKLQITSHKAELQINNKLLAKLKRRSEKIRILWLDDEITDARYKSDISNVNKEIKLCNTKSKEIEKAIVIAEKSLKNDIEHYSKELSVFKTEIQDVLSHVIIDKERVLINIFGWREYDLSKPNSIKLGWEARKPISERYKNEKLPLRKPISDEDLNLMIDNYTL

SEQ ID NO: 35 - protein, 478 aa, synthetic construct
MNKVAIYVRVSTTNQAEEGYSIEEQIDKLKAYCMIKDWSVYDIYVDAGFSGSNIKRPAIQKLIKDTKRKVFDTVLVYKLDRLSRSQKDTLYLIEDVFLENKIDFVSLLENFDTSTAFGKAMVGILSVFAQLDREQIKERMQLGKLGRAKSGKPMMWAKVAYGYTYHIGTGKMTVNQSEAIIVKEVFSSYLNGRSITKLRDDLNEKYPKTPAWSYRTIRQMLDNPVYCGYNKYKGQVYPGNHAPIISKEIYNQVQDELKIRQQKAYEHNNNYRPFQSKYMLSGIAQCGYCKAPLKITLGTIRKDGTRFKRYQCVQRTPRKTKGATVYNNNEKCNSGFYEKDDIEAYVLESISKLQTDSNCIDELFNDEPEKLDRDALNKEIETLSNKISRLNDLYINNLITLDDLKTKTDTLQSKIDILKEKLEKDPALERQKNKQKMLKKLDTKDIFKMDYEEQKMLVRALINKVQVTADSIKILWKI

SEQ ID NO: 36 - protein, 504 aa, synthetic construct
MENVCIYLRKSRADEEMEKTLGHGETLSKHRKALLKIAKEKNLHIVEIKEEIVSGESLFFRPKMLELLKEVEDKKYNGVLVMDMQRLGRGDMKEQGIILETFKNAKTKIITPNKIYDLNNDFDEEYSEFEAFMSRKELKMITRRMQGGRVRSVEDGNYIASAPPYGYDIDYILKSRTLKINEHEAEGVKIIFDSYINGNGASAISEKLNNLGFKTKLGNNFSPSSVLTIIKNPVYIGKVTWKKKEIKKSKTLGKVKDTRTRDKSEWIIANGKHKPIISEEVWNNTQEVLKNKYHIPYQLTNAPINPLAGLLVCGVCGKAMVMRPSRGILRVMCVHKCGNKSVRFDYVEKAIIDSLEQYYSNKKLEVKKQKTIQNTSNEEKELILLENELSTLNKQRLSLFDFLERGIYTEDVFLERSKNIDSRINLVESEMKKISEKIKFKKTKKDTKALLQTLNNAIENYKSSSDVITKNSYLKSILNDITYIKTPEQKRNSFSITLNPKLRF

SEQ ID NO: 37 - protein, 560 aa, synthetic construct
MPRIRKDKMARSYAEPFWKIGLYIRLSREDDNEDESESVINQEKILRDFVDSYFEPGTYVIVDVFADDGLTGTDTARPNFKRLEGCIVRKEVNCMIIKSLARGFRNLADQQKFLEEFIPINGARFICTGTPFIDTYANPHSASGLEVPIRGMFNEQFAATTSEEIRKTFKMKRERGEFIGAFAPYGYKKDPNDKNSLIVDEEAAEVVKSIYHWFVNEGYSKMGIAKRLNQMGEPNPEAYKKKKGFKYNNPNSDKNDGLWSASTIARILQNEVYTGVMVQGRNRVISYKVHKQINVPEEEWFVVPNTHEAIIDRETFEKAQALHKRDTRTAPGKQEVYLMSGFVRCADCKKAMRRKTARDIAYYSCRSYTDKKICSKHSIRQDKLENAVLAALQMQIALVDRLAEEIERINNAPVINRESKRLSYSLKQAEKQLKQYNDASDSLYLDWKSGEITKEEYRRLKGKIAEQIQQLEANISYLKEEMQVMADGIGTDDPYLTAFLKHKNIQSLNRGIMVELVKAVWVHENGEITVDFNFADEYQRIIDYIENNHNVIQVIENKAI

SEQ ID NO: 38 - protein, 530 aa, synthetic construct
MIAAIYSRKSKFTGKGESIENQIQLCMDYAKNLGINEFLVYEDEGFSGKSMDRPKFKEMLKDAKDKKFDYLICYRLDRISRNISDFSTLIEDLNKLNISFVSIKEQFDTSTPMGRAMMYISSVFAQLERETIAERVRDNMYELARTGRWLGGMPPYGFISTQINYYDENMNQRKMYKLKVDEDTIEIVKLIFDKYLELRSLSKLYKYMYENGIKGTRGGNLDPSALSLILKNPAYVKADKSVVDYLRKSNIDVMGDIDNIHGILTYAKNTDSPIAAVAKHKGVIDSDKWIEAQRLLNANKAKAPRAGTGSKALLSGLLKCSKCGSNMRITYKNSKSGTIYYYICGTKKSLGVSACDCRNIRSDKAESKVIDELKNKSIKSIMSSYKDSKLENSKNIKNIKTEINSINSQIKEKETYIDNLVMQLAKVTESSASTFIINKLESLNNDLSNLKSQLESLNTISMENKQVDININMLIDNLNKFNKEIDNSDINKKRLLLSTVVDYMTWDSDTDTIKVNLIGINPSNTIASGK

SEQ ID NO: 39 - protein, 461 aa, synthetic construct
MKVAIYTRVSTLEQKEKGHSIEEQERKLRAYSDINDWKIHKVYTDAGYSGAKKDRPALQEMLNEIDNFDLVLVYKLDRLTRSVKDLLEILELFENKNVLFRSATEVYDTTSAMGRLFVTLVGAMAEWERTTIQERTAMGRRASARKGLAKTVPPFYYDRVNDKFVPNEYKKVLRFAVEEAKKGTSLREITIKLNNSKYKAPLGKNWHRSVIGNALTSPVARGHLVFGDIFVENTHEAIISEEEYEEIKLRISEKTNSTIVKHNAIFRSKLLCPNCNQKLTLNTVKHTPKNKEVWYSKLYFCSNCKNTKNKNACNIDEGEVLKHFYNYLKQFDLTSYKIENQPKEIEDVGIDIEKLRKERARCQTLFIEGMMDKDEAFPIISRIDKEIHEYEKRKDNDKGKTFNYEKIKNFKYSLLNGWELMEDELKTEFIKMAIKNIHFEYVKGIKGKRQNSLKITGIEFY

SEQ ID NO: 40 - protein, 593 aa, synthetic construct
MLAIYARTSTDKAENSTIEQQVKAGIEFASKNNMNPKVFQDKGVSGYKIEEDENKNPFENRPAFTQMIEDIKKGTIDAVWVWEHSRISRNQYASAYIFNIFSKYKIRLYEKDKEYDLNDPNTQLLRTMLDAVAQYERQLIVKRTTRGLHNAIDNGKRSYPSLLGYRKTIKNSKGNYIWEPVESELLQVKNWFTRYKNGESLKNIVFSQNSNENKASHILKRTTHLSRTLQHYVYTGYSLNTKGLDYLKKFDNFEIDNLQMLHNPDYWVKSIPYSLEIINREDWIEVKERLRIYKEKHKKNTNRRAEKSIGTGLITCGYCGAKFFYQVQAHKRKKGLVLYPYYFHMSCLDRTCLQSPKSVSQDKIDTIFKIFVLYSTITSDSKSKFLKERLFQEDIEVKAIKEKVKILKRDHQKTETQISKFKTALETTEDVGAITVLAKQIDNTETTLTEIKNSIISGEAELQERQEAMNKTRSQLMHYSICDLLTQFFEKWNIEEQRNHLLKIVDNAVITGTTLNIKSGEYTYIFDTNKKYEFPTVVYNEMLKEAKEDIDYSSFFRNKPDDHFERRMWSILVMSESVWHICEWRDKEKQLIF

SEQ ID NO: 41 - protein, 469 aa, synthetic construct
MMKKIAVLYMRMSTDMQEHSIESQERVLMEYAKRNGYVVIRKYIDRGISGQHASKRPDFLKMIDDSETGEFQFVLIYDSSRFARNLVESLTYKSILKENCVRLISMTEPNLEDDEMSLYIDAMQGATNEIYVRKLSKSVKRGHNDRALRGDLPGDVQFGLKRLKDGSIVLDEVKAPIMRWMYEAIYYDDSSYYSICETLAAKGIKSQRGNIIDSRQVKRMLMNIKNKAYHWAEKDGKPILKKGNYPAIVDEEIFDAVQEIIAERAKHYKKNEKPAEFRKHWLSGLLVCPHCGAGYSYNTRKPPQHDAFRCGNQTRGACKKGSSILVDVAVEMVLDKLSEVYAGPLAPYVKNITVSQPEPQIDYDKEIKLLEAQLKRAKQAYLAEIDTIDEYAQNKRRIASNIKELQEAKNQAQEGAALNEPQFKVKLLNAITLLKSDCPMSEKIPAARSIIEKILVDPRNKTMDIYFFA

SEQ ID NO: 42 - protein, 532 aa, synthetic construct
MTENNNRVCCLYRVSTDKQVDFNSNHEADLPMQRKACHKFAESKGWVIVHEEQEEGVSGHKVRAAARDKLQIIKDYARRGKFDILLVFMFDRIGRIADETPFVVEWFVRNGIRVWSTQEGEQRFDNHTDKLLNYIRFWQADGESEKTSVRTRTSLRQLVEEGHFKGGNAPYGYDLVRSGRINKRKHELYELHINEQEAAVVRIVFDKYVYEGYGPQHIATYLNNSGYRARSGKCWHPSSIRGMVQNLTYTGVLRCGDARSELMPDLQIVPQEQFENAQRIRNERSVRSTAEAENRLPLNIHGKSLLAGNAYCGHCGAKLELTSSRKWRKMADGSLDDTLRIRYTCYGKLRKQTNCTGQTGYTVHILDEIIDKAVRQIFSKMRGIPKEQIVTKRYEKENTERKNHLQDLQTQRNKAEKDLLALKTEVLACIKGESVLPRGTLAEMITEQEEKLAELENLCESATEELEKTAELMDKVSRLYDELISYADLYDSANFEAKKMIVNQLIRRVDVYRGYQINISFNFDLTPYIEGE

SEQ ID NO: 43 - protein, 486 aa, synthetic construct
MKIAYARVSSREQSENSHALEQQIARLESSQVDRVIQDVESGSKNSKSPGFRELMDLVKEGKVAEIVVTRLDRLTRSLSSLQKTMEILKAHGVALVSLDDSIDTSTAAGVFHLNMLGALAEMEVGRLSERVRHGWSHLRDRRVAMNPPFGYRKENDQHVLDTTPFLCLISDRSEWSRAKISRYYIDTFLQERSIRLTLRVVYPHFGIQVYRSRRRGPHATRLIRFSPSAFNEWLTNPVLQGHLSYRRNASGNRKREDPKTWQIIPNTHEPLITAEEAAMIKQILSRNRQAKGFGSPKRRHSVSGLVFCGECRSACYHQSGCQNYARSKRLGIPQIIRRYYQCKNWRSRACPQKAMVSLDIIEEAVIAALISRAEDLAKMADTPAPTPEPLALRELRSQLADLNRMAYNPAIENAKAQIKNQIAGMELDLTHTTQESSRLGQLISALADPDFWKEGLEPNEKSQLFQDLVSQVIIKDGAVLEVKLKV

SEQ ID NO: 44 - protein, 481 aa, synthetic construct
MITTNKVAIYVRVSTTSQAEEGYSIEEQRDKLEAYCKIKDWSVYDVYTDGGFSGSNTNRPAIERLIKDAKNKKFDTILVYKLDRLSRSQKDTLYLIEDIFIKNNIAFLSLQENFDTSTPFGKAMIGLLSVFAQLEREQIKERMQLGKLGRAKSGKSMMWAKTSYGYNYHKETGTVTINPAQALAVKFIFKSYLAGRSITKLRDDLNEKFPKEIAWNYRAVRNILDNPVYCGYNQYLGEIYKGNHESIISKEDYDKTQNELKIRQRTAAENVNPRPFQAKYILSGIGQCGYCGAPLKIMLGVKRKDGSRLKKYQCHQRHPRTLRGITTYNDNKKCDSGFYYKDDLETYVLTEISKLQNDTNYLEQIFSEDNTETIDRDSYQKQIDELSKKLGRLNDLYIDDRITLEELQTKSAEFTSMRSSLETKLGNDPALKQKDRKKGMINILNQRDILTMNYEEQKVVVRSLIDKVQVTAEDIVIKWKI

SEQ ID NO: 45 - protein, 537 aa, synthetic construct
MKQQIYNTALYLRLSRDDELQGESSSITTQKSMLRLYAKEHHLNVIDEYIDDGWSGTNFERPSFQRMIEDIEAGKINCVVTKDLSRFGRNYIMTGQYTELYFPSHNVRYIAIDDGVDSEKGESEIAPFKNIINEWVARDTSRKVKSAFRTKFAEGAHYGAYAPLGYKKHPDIKGKLLIDDETKWIVEKIFSLAYQGYGSAKITKILREEKVPTASWLNFTRYGTFAHIFEGKPESKRYEWTIAHVKAILKSEVYIGNSVHNMQSTVSFKSKKKVRKPESEWFRVENTHEPIIDKEVFYRVQEQIKSRRRQTKEKATPIFAGLVKCADCGWSMRFGTNTANKTPYSYYACSFYGQFGKGYCSMHYIRYDVLYQAILERLQYWAKAVQQDEEKVLHKIQKAGNAERIREKKKKASALKKAENRQNEIDRLFAKMYEDRACEKITERNFVMLSGKYQKEQIELEQQITSLREELSKMEQDMIGAEKWVELIKEYSVPKELTAPLLNAMIEKILIHEATTNEDNERIQEIEIYYRFIGKVD

SEQ ID NO: 46 - protein, 532 aa, synthetic construct
MKQAISYVRFSSDRQRHGSSVERQEGMIADWLKRHPDYEMSDLKFSDLGKSGYHGEHIKEAGGFGKLLKALEDGFIRAGDVVLVEAIDRTGRLEPMDMLTLVINPILKAGVSIITLDDNTTYSKESVNTAQIFLLVAKIQAAHGYSAALSTRVADSYKKRRKDAAKYGIVPRRITPVWLNPDGTVREDVAPWIKTAFELYVSGVGKSTIAKRMRESGVERLAKASGPGVEGWLRNKAVIGKWETLEGTPDHQIIDDIYPAIIEPSLFYKAQVHAEKMKTQRPIKTASHFLVGLVRCGECGKNYIVQNLHGKPHSMRCRTRQSQNECTNSHCVPKPVLDAIYRYTSVTAAIEAVQQQQMGVNDKEIVTREAELLAITKRVDGLVQALTQTGPIPEVIEALKQSRIEREAAESALVILRSTVVPSAGTHWQEMGKVWKLEAADAQRLAAMLKLVDYHITVAPTGEITASHSEVLYRYIGVDRALDKYKLLANGKLMLIPKGYVDDFPYHEPFQEMQSENTWDEADYDNLRQQHQ

SEQ ID NO: 47 - protein, 472 aa, synthetic construct
MEDSSNKSVGIYVRVSTDEQAKEGFSISAQKEKLKAYCVSQGWANFKFYVDEGKSAKDTHRPSLELLLRHIEQGIIDTVLVYRLDRLTRSVRDLYTLLDYFDKYNAVFRSATEVYDTGSATGRLFITLVAAMAQWERENLGERVKMGQNEKARQGQFSAPAPFGFIKEGKSLVKNHEQGEILLEIIDKVKKGYSTRQIANYLDDSGLLPIRGYRWHPGTILTLLKNPILYGSFRWGDEIIEDTHEGYISKDEFDRIQEILKERSIVKKRDSYSVFIFQSKIVCAGCGNRLASERSKYFRKKDKQYVETNNYRCQTCAQNRKPSIMGSEKKFQKALVKYMQNVTPKLEPKIPEEKKHDYEKVHQKILNLEKQRKKYQKAWSLDLMTDEEFEQLMYETKEALKSAQNELAAAHSSDSQNSQIDIERAKEIVKMFNENWSVLTNEEKRSIVQELIKHINFTKEDGEIIITHIEFY

SEQ ID NO: 48 - protein, 524 aa, synthetic construct
MPTAFSYARFSSATQKKGSSLERQRAMVARWLVAHPDYSLSDQTFQDLGKSGWKGEHIKEGGGFAELLVAVQAGLIQKGDAVLVEAIDRTGRLPVLDMLSIIVSPILRAGVSIVTLEDNLVFTEASLNEGGHIYILVGKIQAARQYSDNLSRRLTASYDSRRRLAKEGKAPKRNTPVWLTSNGDVIGEVAEQIRLAFELYTSGLGKAVIAKRMRESGVPALAKTSGPGVEGWLRNEAAIGRWNGSEVYEPIVDLSRYQLAQIEGERRKTTPTAKTATHFYVGLVKCGSCGGNFIMRTIKGVQVSMRCRKRQELKGCDNKKVIPKVVIDAVYRHTSTPAARKLVAHERRSVNEKAIIAAEAKVLELAKEIEAMVLAFSGAMAIPEVVGRIQALHAEREAAERELALLKVTVERPPTDWRVQGRVDDLGRTDPQRLAAMLRSVGYTITIDSDGRLCTSESKTVYRYAGVNRREDMYRLAVAGGKELLISKIPVEVFDEWWEAEDGDEVVTSEWDADNPDAMRSRHG

SEQ ID NO: 49 - protein, 544 aa, synthetic construct
MQEHSPSNHSSGPVRAYSYVRMSTHKQLRGDSLRRQLERSKAFADEHSLLLDDSLRDIGISAWKGRNFKTGALGRFLSMVESGEIPKGSYLLIESLDRLSREAVPDALTLFMAIINAGITIATLGDDRQIYSRDILNGDWTKLIIGLAVMSRGHEESQTKSERVRAAIHRKRENAREGKGQITGLTPAWIDAERIGANRYTFTLNHHTETVRAIYEMAARGLGATVIARKLNAEGVPAFKSKDGWYQSIIKALLSRHDVIGTFQPHRVQDGKRVPDGDPIESYFPAAIDKDLFLRVQSMRSNPGRPGRKGDMFTNLFTGLCHCSHCGGPMTMKLSRVKGNENGRYLVCSNYVRGHRCTEGNRHFRYEPFETAILDHVRELNLAEAIATTMTNEAITGINETIAALTLQLDELRRKEQRLAMALEDDNQPIDSIIDLLRQRQQERHAIEAGLQYHQQERHRLTVRHNDPAQTCDRIGQLRTAWEQADEATRYGLRSEAHAAIRELITEISFDSGSHSAIVIVANGISAYRLQDGLINGRFHAFAA

SEQ ID NO: 50 - protein, 558 aa, synthetic construct
MKGKIALYSRVSTSEQSEHGYSIHEQEQVLIKEVVNNYPGYDYETYIDSGISGKNIEGRPAMKRLLQDVKDNKIEMVLSWKLNRISRSMRDVFNIIHEFKEHGVGYKSISENIDTSNASGEVLVTMFGLIGSIERSTLVSNVKMSMNAKARSGEAITGRVLGYKLSLNPLTQKNDLVIDENEANIVREIFGLYLNHNKGLKAITTILNQKGYRTINQKPFSVFGVKYILNNPVYKGFVRFNNHQNWAVQRRSGKSDENDVILVKGKHEAIISEDVFDQVHEKLASKSFKPGRPIGGDFYLRSLIKCPECGNNMVCRRTYYKTKKSKERTIKRYYICSLFNRSGSSACHSNAINAEVVERVINVHLNRILSQPDVIKQIASNVIEELKQKHSNQTEIKYDIDSLEKQKAKLKTQQERLLELFLDDQMDSEMLKAKQSQMNEQLEMLDKQIKETQQARESQAEVPDFDKLKSRLTMMISRFSIYLRKATPEAKNQLMKMLIDSIEITTDKQVKLVRYKIDESLIPQSLKKDWGSFFMPKFQFEIDGRKNYFIDQITTFTT

SEQ ID NO: 51 - protein, 465 aa, synthetic construct
MTVGIYIRVSTEEQARDGFSISAQREKLKAYCVAQDWDNFKFYVDEGVSAKDTNRPQLSILLNHIQQGLITTVLVYRLDRLTRSVMDLYKLLDTFDKYNCAFKSATEVYDTSTAMGRMFITIVAALAQWERENLGERVRMGQLEKARQGEYSAKAPFGFDKNKHNKLVINEIESKVVLDMVRKIEEGYSIRQLAIHLDSYIKPIRGYKWHIRTILDILSNNAMYGAIKWSNEIIEGAHEGILTKERFIQLQKILSSRQNIKKRQTHSIFIYQMKLICPNCGNRLSSERSRYYRKKDEQHVECNQYRCQSCALNKHTTKPFATSERKVESALMNYISNLQFEQVPKINNENNELEILKKQVKKVEKQREKYQKAWSNDLMTDDEFTERMNETKILLNSAKKKLQTLEVNNHQEIDVDVIKEKVNNIKKNWFHLSPDEKKQFMSMFIENIKIDKKDGVTEVLDIEFY

SEQ ID NO: 52 - protein, 503 aa, synthetic construct
MNNRIDAIYARQSVDKKDSISIESQIEFCKYELKGGNCKEYTDKGYSGKNTDRPKFQELVRDIKRGLIAKVIVYKLDRISRSILDFANMMELFQQYDVEFVSSTEKFDTSTPMGRAMLNICIVFAQLERETIQKRVTDAYYSRSQRGFKMGGKAPYGFHTEPIKMDGINTKKLVVNPDEAANIRLIFEMYAQPTTSYGDITRYFAEQGILFYGKELIRPTLAQMLRNPVYVQADLDVYEFFKSQGTVIVNDAADFTGTNGCYLYQGRDVKPSKKNDLKDQMLVLAPHEGIVPADIWLACRKKLMNNMKIQSARKATHTWLAGKIKCGNCGYALMSIFNPSGRQYLRCTKRLDNKSCPGCGKIITSELEAVVYQQMVKKLEKHKTLTGRKKAAKANPKIAALQVELLHVDSEIEKLVDSLTGANNVLLSYVNVKIAELDGRKQELVKQIAELTVETISPGQVNQISGYLDTWDDVSFDDKRRVVDLMITTVAATSDSLNITWKI

SEQ ID NO: 53 - protein, 459 aa, synthetic construct
VVTKDLSRLGRNYIMTGQYTELYFPSHNVRYIAIDDGVDSEKGESEIAPFKNIINEWVARDTSRKVKSAFKTKFAEGAYYGAYAPLGYKKHPDIKGKLLVDEETKWIVEKIFSLAYQGYGSAKITKILREEKVPTASWLNFTRYGTFAHIFEGKPESKRYEWTIAHVKAILKSEVYIGNSVHNRQSTVSFKSKKKVRKPESEWFRVENTHEPIIDKEVFYRVQEQIKSRRRQTKEKATPIFAGLVKCADCGWSMRFATNKANKTPYSYYSCSFYGQFGKGYCSMHYIRYDVLYQAVLERLQYWAKAVQQDEEKVLNKIQKVGNAERIREKKKKASALKKAENRQNEIDRLFAKMYEDRACEKITERNFIMLSGKYQKEQIELEQQITNLREELSKMEQDMIGAEKWIELIKEYSVPKELTAPLLNAMIEKILIHEATTNEENERIQEIEIYYRFIGKVD

SEQ ID NO: 54 - protein, 478 aa, synthetic construct
MNKVAIYVRVSTTNQADEGYSIDEQIDKLKAYCEIKDWVVYKVFTDAGFTGSNIDRPAMTNLISAAKKRQFDTILVYKLDRLSRSQKDTLYLIEEIFIKNGIDFLSLSENFDTSSAFGKAMIGILSVFAQLEREQIKERMMLGKVGRAKSGKTMMWAHPAYGYTYNKETSSLDIVPAEAALIKKIYELYIKGKSISKLRDYLNDNKIFVNKSVPWSHRTISYALTNPVYCGMIRYEGKLYDGLHEPIITKELFNKTQEVLAERRMEASKKNPRPFQSKYMLSGIIRCGCCNAPMKSLLGMPRKDGTRTRRYQCINRFPRKTKPVTVYNDNKKCDSGYYYMEDVEHAVLHRISTLYSDEIEASEFFEDEITFDIQKVKDEITKIESKINKLNDLYINDFISLDSLKKQSANLINEKKIIENEIEKENSKQVNNLKEDALKILATNNIHDLDYEMQSYVVKSLIDKVFVTKEDMEILFKK

SEQ ID NO: 55 - protein, 562 aa, synthetic construct
MLHCGFPCHEERAMPSAVPYIRFSSARQTTGSSAERQRQMVTQWLTQNPDYILSELTYEDLGRSGYHGEHLNDDNGFAKLLQAVEAGSIKAGDVVLVEAIDRAGRLSPMQMLKRVIIPIIEAGVSIITLDDNVTYDESSVEGGHLFLLVAKIQAAHNYSKQLSDRTKASYAIRREQAKATGKVKRHTPIWLTSEGEVIEHVAVHVRQAFELYVSGVGKTTIANRLRASGVPELATCSGPTVEAWLRNQAAIGNWEYGKDDPDKPSEIIRGVYPAVVSDELFLQAQLRKKAAATKPRERTSKHFLVGLVKCGVCGSNYIIHNKGGKPNNMRCGTYHRLKKAGCTNDETIPYQVAVYIYSETATHWVDKALQQVQLTVNDKRKLVLTTERDALTTSITNLTEKAAALNIPELWKKLEEESNRRKVVEDELAVLERTPDAGGESGFSAALSQDQMMIHDPIQLSALLKQVEYSIVVYPNKLFTVSGEVYPWLYLGPKRKPKSNVTLGYRMLYLGDEIIISPDVPVTLDWGAPTDNPVEQMRYMLRRAYKMVSAPKPYEYNDDVAE

SEQ ID NO: 56 - protein, 527 aa, synthetic construct
MEKAVLYLRLSKEDIDKISEGDDSASIKNQRLLLTDYALKHDYQIVDVYSDDNESGLYDDRPDFERMIQDAKLGKFSIIIAKTQARFSRNMEHIERYLHHDFPILGIRFIGVTDGVDTADSSNKKARQINGLVNEWYCEDLSKNIRSAFKAKMKDGQYLGSSCPYGYIKDPTNHNHLIVDDYAADIVREIYKLYLQGIGKGRIGRILSDRGVLIPSLYKRNVQGINYHNANAKAETHLWSYQTIHQILNNQMYLGNMVQYRTTTLSYKDKTKKLRLPSEWIIVEGTHEPIISYAIFQRVQELQKIRTKEVNTEQKYTNIFSGLLYCADCNHTMNRNYTRKGVFCGFICSTYKRHGNKAGCRSHRVDYDALCDAVLESIKLEARKILSDKDVDELKKSRLISSREEKIENEIRILENECEKLKQYKQKTYEAYLDDLITMNEYKVYIKKYDTELSDTCKKIDKLYAEKQVTDSLDQKYKEWVNMFSDYINITELTRTVVIELIKRIDVYEDGNIKIHYRFKNPYESSK

SEQ ID NO: 57 - protein, 387 aa, synthetic construct
MSKRTRRTFSQEFKQQIVNLYLDGKPRVEIIREYELTASAFDKWVKQSKTSGSFKEKDNLTPEQKELLELRKRNQQLEMENDILKQAALIFGPKRQVIDANKHLYPISAMCRILGLSRQSYYYQSKPKKDESELEEVVAEEFIRSRKAYGSRKIKKALSKRGIKISRRKISRIMKNRGLKSSYTVAYFKIHHSTCNEAKTTNVLNRKFLRDNPLEAIVTDLTYVRVGKKWNYVCFNLDLFNREILGYSCGEHKDAVLVKKAFSRIKQPLTEVEIFHTDRGKEFDNQTIDELLTTFDINRSLSHKGCPFDNAVAESTYKSLKVEFVYQYTFETLQQLDLELFDYVNWWNHLRLHGTLGYETPVGYRNQRLAQRILDNELGCANASEAV

SEQ ID NO: 58 - protein, 581 aa, synthetic construct
MRSAIPYIRFSSARQTTGSSAERQQQMVTQWLTEHPEYTLSDLTYKDFGKSGYHGEHVKDGGGFAKLLAAVEAGDIKAGDVVLVEAIDRTGRLHPLDMLNKVITPILAAGVSIITLDDKVTYTHESAASGHLFLLVAKIQAAYGYSKQLSERTKASYAIRLEQAKEGNKVKRNTPVWLHSDGRLNDDVAPYIKQAFELYVSGVGKTAIANRLRASGVPELVKCSGPTVEAWLRNQAAIGNWEYGKDDTDKPSQIILGVYPPVISNELFLQAQHRKSAVATKPRERTSKNFLVGIVKCGVCGANLIIHNKDGKPNNMRCLTHHRLKDAGCTNKETIPYQVVHFVYLQTAPAWIDKAMKVIQLTDNEKRKLTLTTERNEVTASIQRLAKKIAKVDSVELEAEFDLVNERRAAIDIELNILGRTDDDGAESKSKSNYVGYESNLEHDRLAFRDPIQLSALLKQAGYSIVVQPGRKLYLPNDNHPWVYAGVVRKGNMTLGYRIRNSEEEFTISQAIPEVPDVRLYGNIPNGDLVHVAERSYKYAKPPTLLNSSDKHSRKGVFVLRFESADIAMEYMKSGIETDSK

SEQ ID NO: 59 - protein, 534 aa, synthetic construct
MKQAISYIRFSSARQEGGSSVERQEGMIAKWLLDHQDYELSKLNYSDLGKSGFHGEHVKEGGNFGKLLKAVMDGYIKRDDVVLVEAIDRTGRLPALQMLSDVIAPILRAGVSIITLDDNTTYTEASVGGPHLFMLVAKIQAAHEYSRTLSRRVEDSYKKRRKDAKEKGVAPKRMTPVWLNSDGTIREDVAPWIKTAFELYVSGVGKSTIAKRLRESGVERLAKASGPGVEGWLRNKAVIGKWETLIGTPEHHVIDDVYPLIIEPSLFYKAQVHAEKMKTQRPIKTAKHFLVGLVHCGECGKNYIMQNLHGKPHSMRCRTRQSQNNCSNSYVVPKPVLDAIYRYTSVTAALEAVQLQQLGVNEKEIVTREAELLTITKRVEGFVQAVNEAGPMPELLTALKQARIERESAENALVILRATVVTPPANQWREMGKVWSLEAEDAQRLSAMLRQVGYNITVGKGAIIKSSHSDVVYQYLGVDRVKDMYRVLADGEMKLIHKSQVDDYPYHEPFHEVVGEATMDETDKENLLLQYQSS

SEQ ID NO: 60 - protein, 534 aa, synthetic construct
MSTSIPEESGPNDLELRGTPAGLPPYADLVAANPNAIFVGAYSRISDDWRKNKSKKAAASRWSAGKGVANQHRRNDMNAGRHQVIVVHRYTDNDLVASRLDVFRPDFAQMLKDLKLGRTKDGYRLDGIICVHQDRLQRTDTDWEHFVHALLAKPGRLLWTPSGSSDLTDEGEIVKTGIMAVLNKAESMKKKRRIRDWHQDLILDGLPHSGPRPFGWNEDKMTLRAEEADYLAWAIRERIKGKALSTLCAEAKKRGLKGTKGGEIAPTTLSQMMTAPRVCGYRANRGTLALDENGAPIVGKWDTICKPEEWEAVCATFSPGSTYMHRGPGAPRVTGKPKTVKYLASQLLRCMNKVERDGETRICNGTLTGSPTKSARSPYTYRCGSCNKNSIAGPMVDRQITRLLLGKLGEAQITYRRPELAWHLESTLKTLADRLAGLENRWMAGEVDDEQFYRLSPGLQAEVRKLRAERARWELENAAGSEEPADIIRKWRSGELDLAQRRRILFDVFAAIQVTPGQKGSKTPNPHRLKPIWG

SEQ ID NO: 61 - protein, 519 aa, synthetic construct
MERVLMHLRKSRADLEAEARGEGETLAKHRNILLKLAKERNLNIVKIREEVGISGESLIHRPEMLETLKEVEEGLYDAVLCMDIDRLGRGNTKEQGIILEAFKNSNTKIITPLKTYDLNNEFDEEYAEFGAFMARREFKFITRRLQRGRVATVEEGNYIAPRPPYGYIIEKNNKERYLIPHPEQAPIVKMIFDWYTHDDPNVRMGASKIANELNKFCKSPTGIAWKGSTVLSILKNAVYAGRIQWRKKEEKKSITPGKKKDVRMRPKEQWIDVEGKHEPLVSMETYLKAQEILERKYHVPYQIQNGITNPLAGLVKCGICGSSMVYRPYTHQRHPHLICYNRYCTNKSSRFEYVESKIIQGLHQLLAQYKADWFKHQRPKVNDDSVDLRQKALHRLEKELNDLYKQKDNLHNLLEKGVYSIDTFLERSNILAERIDDTKKAIHDAEKALAEEVQRNKVKKDIIPTVENVLELYYKTQDPAKKNNLLKSVLDYAVYRKEKHQRDDDFTLVLYPKLPQINS

SEQ ID NO: 62 - protein, 516 aa, synthetic construct
MQDLPKQAYSYRRFSFLTQKFGSSLKRQTKLAQDYATQHGLTLSDTSFEDLGVSAYRAANASEDAGLGQFLLALREGKITTPCTLLVENLDRLSRAKIKVAMRQLWDITDQDVHVVTLVDGRIYTKDMDFEDIMLAGLIMQRAHEESETKSKRLQEKWQERRTLGKFIHKNCPFWLTPNKDRTDYEVNKYIETVHQIYAMALGGLGSRVIAQELNSSGITAPRGGLWSTATITKVLNNRAVLGEYQPKQRVIVDGVRSEKPIGSPIQNYPVILDSDYFDQVQSALRGRHKGNNRNSTKTYRNVLKHIAHCGCCNGTIRLKQQQHLYYLQCSVECKGSRPVSIRYLHDWLNEVWITSDFASVSLSDVPEAKELATLESELEKLTEAVSGLAAAYAATLDPTINSQLLETSAKKVETQTKLDDLRSELSPYNQTKAAQFERQMLVDLAFSERNEVENFVARTKLTGLLAQLKDFIIHKGQNDIVTFEIKTAQNESKTYTAVKNPYHKTRKLTGKIWNY

SEQ ID NO: 63 - protein, 464 aa, synthetic construct
MKKRAGLYIRVSTEEQVDNYSIPEQKRRLEAYCQSHDWAIAEEYIDGGFSGAKLDRPAMQKMIADSKAGNLDVVVSIKLDRLSRSQKDTLHLIEDIFLPYHVDYVSVNESFDTGTSFGRAMVGILSVFAQLEREQILERMHSGMEARAKTGLYHGSKPPYGYALEKGVLKINPTEALAVRKVFDLWLKGYSYNKISEIMEETYHGEKAWMHPSAINQLLTNPAYTGKIRFAGEVIEGQHEPIIDEITFKKANLRLETRAANRGRQTTYLLTGVIWCGNCGSRFGINMSTCNGVRYTYYTCSPNRRKKGNEGIRCCGNKPIPTKKLDPLIIEKIKRLAISKDFFEEIQKPDASPSDAIASLESAAAEIDKRIGKLMELYSMDGIPTDTLSQQINTLYAQKKDLESQISEKQSGFKQTYEDYKEVFDKVDYAFKSGTIEEQKSIVRSLIKRIDILNQEITITWNFQ

SEQ ID NO: 64 - protein, 509 aa, synthetic construct
MRVALYYRVSTKLQEDKYSLAAQKEELTKYAKSQGWNIVGEFKDVESGGKLEKKGLTALLDLVDEGGVDVVLVVDQDRLSRLDTVAWEYLKSVLRDNNVKIAEPGNIIDLNNEDDEFISDIKNLIAKREKRAIVRRMMRGKRQRMREGKGWGLPPFEYQYDRQTGKYKAKPEWKWVIPFIDNLYLNEQLGMKAISDRLNEISKTPTGKSWNEHLVHTRLVSKAFHGVMEKTFANGETISIPGIYEPLRTEETYRKIQEEREKRGEQFSVSGRKGSEKHILKRTKITCGECGRKIQIATHGTKEKPIYYAKHGRKERVDGSVCDININTVRFDKNIMTALKEILSSEEQAKKYINLDIDQNELNALKKNIKTLNKRISKLQESLDRLLDLYLAGGLKKEKYLEKQKQLESQIEIYKKELDQNELKLKTVESNMWNYEYLYEYLEVIADLEKELTPLERAQLVGKIFPTATLYREKLILTADVKGIPVDIEIPIDPDPYPWHPKKRNTSIK

SEQ ID NO: 65 - protein, 529 aa, synthetic construct
MRKVYSYMRFSRPEQAKGTSIERQSNFAEQYALEHGLELDKSLTMMDKGLSAFHGVHKTKGAFGQFLAAVTAGKVPSGSVLVVESLDRLSREDPLIAQAALTDLILSGITVVTAADNQVYSREEIQQNPFKLIMSLVVMIRANEESETKQRRSNAFLKSALNQYQANGKIRRLGSDPSWLDFNKDNDTYSFNERVEVIRRILNLYNKGIGSLKIARQLTEESILTLSGKRSAWGQTTVANIVKSHALYGMKRINVQSVEYDLEDFYPALITKSKWLALQQHRTKRSKSMHGRGEVVHLITGHGKGFTTCGYCGGGLGAQTQKQYKRSGEYSRTVTRLHCLTHKETSSCCSSVFLEPIESAVLFAACIGVEPQSLVPTVNNVNYSALIDEVENKVKHIVEQVTAGAPWDLFKDAHDKLKLEKQKLIKERDSQKPDVNQSDVQKWVNKLVELADKARANDKEARLKCRTLINSICKSIVIKLRGHDLKSEPVVTITFVTDEQFEFKVGKNGAVQFVDNGMAVNRRLKPLLA

SEQ ID NO: 66 - protein, 544 aa, synthetic construct
MKQLNIQSSSKITALYCRLSRDDELQGTSNSILNQKMMLEKYARDNNFTNLEFFIDDGYSGTNFNRPDWSRLQSLIDEGKIGCIIVKDMSRLGRDYLRVGYYTDIVFPEADIRFIAINNGIDSNESTENDLTPFINIINEFYAKDTSKKIRAVFKAKGESGKPLATIPPYGYLKDKEDKYKWVIDEEASKVVKKIFQLCVQGYGPSQIASELIKEGIPTPTEHFDKLGINVSSPLSEIKGNWQPKTISLILEKMEYLGHTVNFKTYKKSYKSKKKLENPKEKWQIFENTHEAIIDQETFDIVQRIRQGRRVRNNLGEMPALSGMLYCADCGAKLYQVRGKGWEHEKEYFVCASYRKHKGLCTSHQIKNVQVEELLLHELKKITEYARQYEDDFVKLVQSKTQNELNKSLKESKKDLVHVKERINKLDTIIQRLYEDMVEGKLSEDRFQKLSSNYETEQCELEKKATMLEKIIHDTEQTTLNTTAFLKQVREHTTINKLTPEIIRMFVDKIIVEKPEKIEGTRTKKQTIWIYWNYIGILDIEKTA

SEQ ID NO: 67 - protein, 510 aa, synthetic construct
MRAAIVRRVSTLKEVQENSLQNQKDFFEDYVQSKGWDIAEIYTETETGTKFSRKEMNRLIADAKAKKFDIILAKELSRLARNQRLALEIKEVIEKHGIHLVTLDGAIDTTTGNTHMFGLFAWIYEQEAQRTSERIKMALETKAKKGLYKGSNPPYGYVVREGRLYVSDDGSSEIVERIFQSYLGGKGFDAIARELFEEGVPTPSMIAGKKNQTIYWHGSSVRKILENPHYTGDMVQGRQSTISVTNKSRKEKPKTEFIVVKNTHESIISGEVFESVQQLIAFNRKKSIDNPDVCSRPHQNVHLFTGVIFCPDCGSGFHYKRNGACYICGRSDKLGDKACSKHRIREDALVAIIRWDLQRLSKLLDDQSFYNTVKDKFVKAKSKLEKELKACAGKIENIKNLKSKALSKYLEESITKSDYDDYIAAQDAEIQKLLHNKEKLDSAISASVDVDVLGKIKGIVASSLEFQEINREVINRFIEKIEVTADGNVKLYYRFAGTSKILNELMTDVN

SEQ ID NO: 68 - protein, 533 aa, synthetic construct
MTALYARLSQEDTLEGDSNSIVNQKAVLSKYAADNGFSNPVFFIDDGVSGVTFDRPNFNRMIAEIEAGNVATVIVKDMSRLGRDYLKVGYYTEIFFVERDVRYIAINDGVDSAKGDNDFTPFCNLFNDFYAKDTSKKVRAIKRAQGQAGEHLTKPPYGYMVSPTDKKQWIVDEEAAAVVKQIFDLCIGGKGPMQIAKILKEDKVLTVKAHYAEKKGKTFPDNPYNWNENSIVAILERMDYCGHTVNFKSYSKSHKLKKRIPTTKEQQAIFFNTHEAIVEDAVFERVQELRANKRRPTKADRQGMFSGLVYCADCGSKLHFATCKSFNGSQDHYRCSNYKSNTGSCTAHFIREEVLKQIIWSRIFDVTALFFDDIIAFKEMMYQQRSTETEKEMKRRKREVMQAQKRIVELDRIFKRIYEDDISGAISHDRFLKLSAEYEAEQRELEEKVKSEQQEVDTYEQNMSDFDSFSAIIRKYVGIKELTPAIVNEFIKKIIVHAPEKADGKRVQKVDIVFNFVGEINFLSATQPKRQGA

SEQ ID NO: 69 - protein, 498 aa, synthetic construct
MLTVAYVRVSTDDQVEHSPDAQRRRCAEYAAQRNLGPVKFLSDEGQSGKDLERPAMQELVGLIEAGQVTNLIVWRMDRLSRDSGDTSRLLRLFEQHCVNVHSLNEGDLETGSASGRFTAGLHGLLAQLEREKITENIHLGNEQAVRTGFWINRAPTGYDTVDRVLVPNDDAHLIRRAFKLRAGGQSYPQIEQGTGLKYSTVRHALENKVYLGFTRLRDERFPGKHEPLVSQAEFDAAQRAHTPGRRRGKDLLSGRVRCGECGRITGIDTNGRGKPIYRCRTRGNGCAIPGRSAAGLRRAARLSVELLRTDDQLVEAIRTHFAEKTERAGAGTAEPSRAGTLGSLRSKRQKLFELLLAGKITDDFFAEQERQLTAKIEATEAHRTEAIETHRHHNALAEAFEQAAAMLRDPAFELAEIWDNASAAERRVIVEELIESVTIYADRLEVNVTGAPPLLVTLAEVGLREPGTAPVVSEDLTDFRSSGAWGLSGRTRLIDWVA

SEQ ID NO: 70 - protein, 518 aa, synthetic construct
MEINAVNHIKDVAIYLRKSRGQEEDLDKHREELVELCEKNGWRYVEYGEIGSSQKLMDRPELSRLLKDIQEDMYDAVVVMDKDRLSREGVGQAQINKILAENDCLIVTPTRVYDLTNESDMMVSEFEDLMARFEYRAIVKRLKRGKRRGAKQGKWTNGTPPIPYIYNPKFRDKTDKSIEKGEDLDSLIVDEEKLEIYRFIVDSFLNGMSPYTIAWELNKRKIASPRGSTWNNTGIRRLLKDETHLGRIIANKTTGSKKRLSTGRLDYKVNKREDWIIVENCHKAVKTKEEHEKILIEMQKRKRDSYATTGENALSGLIVCSKCGATMAQKKSKIESERYSYVEACKNFLEDGITKCDNHGGSTMYLMKEIERQLVMYRDDIEKENERVSKGGGLTKTIESEKKKKEERIIELEDELEQVTTLALAKFFTPEEAVQQKKKILDNISKLESELYALNLQTDNLGNMTRSEKVNAINKFLEVMDMPHISNSDLNRLYKTIIHSIIWDKSNPDELKVTINFL

SEQ ID NO: 71 - protein, 570 aa, synthetic construct
MKRAALLLRCSTNIQDYNRQKLELEKVANRFKLKVAKVFGEHVTGKDDIRKGNRKSVDELINACENNEIDVVLISEVSRLTRNFLYGVTLVDKFNRDYSIPIYFRDKRKWTIDVETGEVNLEFEKELRKAFEQAEEELASIRFRMASGKRDSAGLGQWFAGFPPFGYTRQKNGYLVKNEYAPIVKEMFDKYLEEGQALITTTRYIYGKYPDIKKLKSIGNTKFILNNKAYTGRAEANIYDEIDKVTDTFYFDIPAIIDEETYNKVQKKLANNRTTTPYPKAAKYLLQKLIKCSICGAFYTRLHSNKRDTVHFKCTSDKNSLTGCKSQVYLNERIVNPIIWNFVKEQLFYVGKMNAEQRLEAIAGENDNKSKAIEEQEALKISYKEQENKLTRLEDLYLDNDIDKNRYKERKSKIEKELSSIKAQMDRLTDRIRLSDFNIKRFNSTDFTEQYFKEVEADLEKQMKVLREYVKGIYPLYIDKVYCFLKVDTIEGMFNIFYEPRKAQQKCAYFIKDTLAQYHPDIRNFYTPNNTLLTDSDEVDAYYTLEEMKEICSRNGFEVRYRESEQIDNO

SEQ ID NO: 72 - protein, 461 aa, synthetic construct
MKVAIYTRVSTLEQKEKGHSIEEQERKLRAYSDINDWKIHKVYTDAGYSGAKKDRPALQEMLNEIDNFDLVLVYKLDRLTRSVKDLLEILELFENKNVLFRSATEVYDTTSAMGRLFVTLVGAMAEWERTTIQERTAMGRRASARKGLAKTVPPFYYDRVNDKFVPNEYKKVLRFAVEEAKKGTSLREITIKLNNSKYKAPLGKNWHRSVIGNALTSPVARGHLVFGDIFVENTHEAIISEEEYEEIKLRISEKTNSTIVKHNAIFRSKLLCPNCNQKLTLNTVKHTPKNKEVWYSKLYFCSNCKNTKNKNTCNIDEGEVLKQFYNYLKQFDLTSYKIENQPKEIEDVGIDIEKLRKERARCQTLFIEGMMDKDEAFPIISRIDKEIHEYEKRKDNDKGKTFNYEKIKNFKYSLLNGWELMEDELKTEFIKMAIKNIHFEYVKGIKGKRQNSLKITGIEFY

SEQ ID NO: 73 - protein, 543 aa, synthetic construct
MPKTKTPKTAARVYRAASYARLSVDDESYGTSGSVLNQHAMIRDFADANGGLSIVAEYSDDGFSGSTFENRPGWGSLLADVETGKVDCIVVKDLSRLGRNYLDVSRYLDQVFPALGVRVVAITDGYDSAAEKTPADALMLPVKNLFNDMYCRDASAKTKASLSAKRRRGEFVGAFAPYGYAKGSGPDRGRLVIDPEPAGVVRGIFDARIGGMSAAGIAAMLNESLVPSPYEYFAAKGAARSSNFCKGERTAWDARTVLRILSNETYAGTLVQGKTCKPDFRRKAVLSVDESEWDRSPGAHEAIVDPATFGLVRKLARRDMRLSPGAKRSLPLSGFLFCADCGATMARHASRCSSGKRFYYSCETHRKNRAECGMHKVWEDELSAAVMRAVHGHALAAVDGDGVVRSAEAYRHDRRAELACRLESVEGRIEHNGDLRLRMYSDYAAGVIDKAQYAELARAVDVRLQELKGEKAGIERETAQLDDVHAETWEQTLARYRDAEGLERVMVVELIDRVLVGEGGDIEVVFRFGGPVAACATRQEGVA

SEQ ID NO: 74 - protein, 557 aa, synthetic construct
MLQSNKITALYCRLSQEDMQAGESGSIQHQKMILQRYADEHHFLNTKFFVDDGFSGVSFEREGLQAMLQEVEAGRVATVITKDLSRLGRNYLKTGELIEIVFPENGVRYIAINDGVDTAREDNEFTPLRNWFNEFYARDTSKKIRAVKQAQAQKGERVNGEYPYGYIPDPNNRHHLIPDPETAPIVKQVFAMFVSGVRMCEIQKWLAENKVLTIGALRYQRTGQARYQRAMIAPYTWPDKTLYDILARQEYLGHTITAKTHKVSYKSKKTRKNEEEQRYFFPNTHEPLVDEETFELAQKRIATRHRPTKAAEIDIFSGLLFCAGCGHKMYYQQGVNIEPRRFSYSCGAWRNRARTGSECTSHYIRKNVLLDLVLEDMRRVLQYVKEHEQDFICKATEYGDMEARKALAQQQKELSKAQARMTELDTLFRKLYEDNALGRLTDERFVFLTSGYEDEKKSLAARIDELQQQIATVTERKRDISRFIQIVGKYSDIQELTYENVHEFIDRILIHELDRETNTRKIEIHYSFVGQVDTEQEPTQVVNHDRRNMVDVKSIAI

SEQ ID NO: 75-87 - skipped (13 entries)

SEQ ID NO: 88 - protein, 541 aa, synthetic construct
MPKAISYIRFSTKIQSVGDSTKRQSKYINDWLKRNPDYYLDESLRFQDLGISGFSGANAKSGAFGEFLAAVESGYIEAGSVLLVESLDRVSRQDIDTAGEQLRKILRSGVEVVTLVDNEWYTKESLKDSLSMIKAMLVMERAHEESAMKSTRLRSMWAAKRERAAKGEIMSKRCAAWLKVSEDRSHFEFIPENVKAVQRVFQLRLEGLSHIKIAKQMNDEGFYTLNQHKSVKGGWSQSSVTELLSNRSVIGFKVPSKSMAVKGVSEIPNYYPSIITDEQFYAVQQLKQGSGRKPSSDLPLLTNLFKGVLRCSECGFIVVVAGVSAKRSGIYKCSMKSEGRCNSVGFSRLQTDRALVQGLLYNTNRLSLNRDNGSAIGSLQSELEQLQKQRERLIKLAMLADDTESMAKDLKALNSQIKDAEKAVSEVHQREQSSQLETISHLDLTVKKDRIEAQIIIKRIVKEIRLNTAGKKCDVFLHNGLKLLNFPLDRVVDGAQWLEVLPLIDGDEFDFVEFTTKPRHIALEEAPDWVKEMDEQSNQPL

SEQ ID NO: 89 - protein, 459 aa, synthetic construct
MSNYTMKRAALYIRVSSDQQAKFGDSLREQQDTLQEYVKTQKDMIVHSIYIDDGISGQKLERDEFKRLMNDINSGLVDIILFTKLDRWFRSLKHYLNTQELLEKNHVHWIAVSQPYYDTTTAYGRTFINQVMSFAELEAQMTSERMKSVFANKVKMGEVISGSTPLGYSIDDKRLKPDNQAHIAQAVFAYYNEHANLNKTAKFLLEEYGISRTMQAIRSMLRNKKYIGEFRDNKNFCEPIINQELFFSVNRQLSMNQKSNVKNMYLFSGILVCGECGKKMNSGQKSVWGNKRKDGTRIKYPPKSMYSCRYAYQHPKCLNTKSIREHVLEARLLDNIDDLISVEINELKSVKKKLPDNKYKQKAIEKKIDRLKNAYLNEVISLNEFKHDRQKLLTELSELTLTSEENSTKQKIENLETLLSMNIKQNYSNMEMYEQKTFWRSFIKNIKFDSSKKITVNFL

SEQ ID NO: 90 - protein, 492 aa, synthetic construct
MNVAMYLRKSRADENNPLETLERHKEILLSYAKDNNLTVIDIFEEVISGGMLYNRTEMLKLLDAIPSHIYDAVLCIDLDRLGRGSAADSEKIFDVLKENDVKIITLKKIYDLNNEYDEDYSEFEMFMARKELKFITRRMNRGRIKSINDGCFVSGAPFGYRNAVINKKHTLEVYEPEAKYVRMIFDMYVNQSMGITSISRQLANLGVLSKKNTPLHPTTIARMLRNHTYIGKIVWNKSKSVKGKNTQEKTSKDDWLYVPGLHEPIIDENTFNKAQDIINLKYKPPMRTGTLQNPFAGLLKCANCGRAIVINTSNETVEKYRLCCRTLGCNKASALSIVEDKVFEVLTKEFKDIELSLKNIRQSHNKDKLSCLDTIATLETELKKLDKQQLRLYDLLEQEVYTKELFLERNNAISDRRKKINATIAQEREKFKLVDTSSIEERLPLLRELLTNYNSLSATEKNSILKNFVKKIEYKREKSAPEGDIFLKIYYK

SEQ ID NO: 91 - protein, 520 aa, synthetic construct
MKEISHVGIYLRISQEKKGNQKAEGAETLDNHKQMLTEYARSQGWTWKEYGEVLSGGASDMERRPELQRLLQDLEKFDALLVVELSRLSRNGKISQTVKQECIDYDVPIITPFQTYDLANNENDRLMFDFGSLISAHEHGTIGKRSKANKIQMTKAGLHVSGGVPYGYRRNNQTKKLEIYEPEAKAVRYIFQLHGQGLGSRRIVDLLNAEGYLPQRSNAWNSTSVRRIMKNPTYKGTIFFNDRKRIKEAGKYVYKILDTITIENAHDPIIEPSVWERTNLERTDRVERFKGVREKPSAQFHTILKDLVFCGVCSRKSSYKTEQNGKVSIRPCQFQLPSSAEKCNNCGLLVEYLEQDVVNDLKQYREDLLQELNQLQDNDTSSVERELSDRFNHIEGQLVNVKKQQANLIDLALSGVFSHDEIKEKKQQLIDQQHDLEKKLEGLTAQLGSLDIEPLTDRIEHVVELLESFEMLSVENQNNVLKQVIKRINYTRDIPEELRKLSTRNEERRNYPYTYEIIYF

SEQ ID NO: 92 - protein, 496 aa, synthetic construct
MTTPCYVYSRVSLEVQVEKTGLERQRSMALDWLSKNPEYHLEESISDDGRSAYKGHNLSSGALGEFIRRCERGEIPENSLLLVEAIDRISRRSVDEQRELWRKLKDLRINIAVAKFGGKVFKWNDQFELGYDIQLTVMMDLAHQESKQKADRIRDAHARNFGVTKSKMCPYWLRLKDDRSEYEVIEEKAKVVRQIFQMKLDGMGADSIVRTLRKEGIKTSSGRWFNVGTVRKYLKNERVMGWLRKSSTIYTDDGRTERQPTNQVIKDYYPAIISEEEFNAVQMSFKKMTSGKRGKIANPLRGLMECPKCERPMTLTNKWLRCRGRASFKDCDHTYLIAEPIFDAFNKYMRKIIAVGMKGGGVNLRDIDAKKHEIEQLESERNNIIASLRYLPDEASRQDAGREVEIVNTKIADCNLALQELQNKKVGDEVNLDFDFNSEKGKFKVNSILSSTLTKVVLDDHDCRIYFKNGNEIGISYVLMKGLIESEDRLNEEHHY

SEQ ID NO: 93 - protein, 557 aa, synthetic construct
MGQSNNDRITALYCRLSRDDEQLGESNSITNQKSILSKYAENNNFKNIKFFVDDGYSGTSFTRPAFMKIMELAEQGQIGTIIVKDHSRLGRNRLIVGQLLEEDFVRLNVRYIAIMDNIDTDKGLNDFLPIQDWFNEMHAKNTSQKVRAVFKNKGNSGIPLTTFLPYGYIKDPNNKDKWLVDEPAAEVVKKIYNLCIQGYGTTQIARKLKEDGIMTPTEYYQSLGRKSPTKVQEVKNFWNADTVKNILDRQEYIGDTVNFRSTQRSFKDHTKIDLPKEKWKIFKNHHEPIIDEETWNTVQRIRNNKRRPTKTGKQSIFSGHLFCKDCGAKLYYCTANNFTADKDFYRCSNYKNNSTNACTSHNIRDIVLREIVLEQVQQVISYIHNFEWLFIKEKQNTSIEEQKVQIARDKKQLVQYQQRLKEIDNLIQHIYEDNVSGKITDEMFSNFSTNYTNEQKDLKEKIEILNKSISTTEQKEIAITSFVDKVKKYTEIKEITPEIINELIDKILVHQQTKIDGKKYQQIDIYYSGVGIISVSTNEYDFEREFQNMLKNKIKTA

SEQ ID NO: 94 - protein, 571 aa, synthetic construct
MDNNSDIRVAIYIRVSTLYQIDKDSLPMQREDLTNYCKYIFNTEDYEIFEDAGYSGKNTGRPAYQEMMLKIRKKQFTHLLVWKIDRISRNLLDFSNMYEELNKYNVTFISKNEQFDTSSAMGEAMLKIILVFAELERKLTSERVSSTMISRATKGLWNGANVPLGYKWNEEKKYPSPDEKEAKVVQYIYSTYIQCKSCSKVSKILNEEDIPTKRGGKWTSKTVNDILRNPFYKGTYRYNYKESARGKKKDESEWIVIDNNHEAIIDKAIWQLANETLDTNAGLVGRRYVGKIHTHIFSRKLVCSKCKSGYNASKDTMRENGYTPSKYVCSGKVRKFICDAKLVSDVVLGPFVLTLIKNIILAGNMCIDTTDELEDILLDGSPFEDVLSINQEDLEMLYVALYKVPTQKSNITYSHIKDKQPKSLEDQENEYVKKRIEKFKKEKTKYINALERLEELYMFSEEGISKVDYVIKKKEYESKLNNSEENLKQFYRMNDTEKNIQDMTFILNYENIIFNRAMNDNNELDFKMLMTNVNNKVVKDLIDMVIKNIYMNDKAVDIIEFQNGLALHFNY

SEQ ID NO: 95 - protein, 524 aa, synthetic construct
MSKQTPPAGYARVSLFLPGAVSDEAQKSECNAEAARRGLSEPVWYVDVDRTASDERKPRPAFDQLMADVKAGKVKVIISRSSDRFVRRPRELESIIDVLSPRHVPVYFTRDSDYDLSTAGGRETARIKASIARGEVERMSERMKSSAEERARRGVPRKGNRPFGYTFANKSDGTLTFTQVGPEAEAIRWAFDYVMSGGTLAGVAREWTGRGFTTAHGKVGRNWSWLGVKQAVLNPAVGGFRYYQPTSVLTIGEARKVPWECDFIPGNWKDDSILSGQEWRDLRTVLTSTRQKAGNRKRHLGSGIYLCGLCDDGTTLKSARRGGELMYRCREKSHLNVPGQNLDAFILEMVRRALVDRDIFEASFGTSSAVDAAALDQQRKEAQKQLDQLEEAYAGKRVSISVFERTSRRLEAEITDLDDRLSVINAEKSRIVRLMSFEEVDRALEDADLTQRRQLVADIYPKVIIRAPGKGRAFNPEYHVRMIDRAGREWPTWLHEWSQNRQLNSARALVEARHQVGPASGNPT

SEQ ID NO: 96 - protein, 433 aa, synthetic construct
MVQDALAGKIDLIITKSVSRFARNTVDTLTTIRLLKEHGVEVYFEEQNIYSLDSKGELLLTIMSSLAQEESRNISENVTWGMRKRFADGKVALPYKQFLGYKKGADGIPEIVPEEAAIVKLIYRLFMEGKSPAYIARFLSSCNIPSPAERPQWRPETVKSILSNEKYKGDAILQKTFCTDFLTKKMKVNEGEVPQYYVENSHPAIISPEMFEAVQAELVKRKRSNHRNYTPHCFSGRVFCDECGALYGSKVWHSKTVWQCNARHKGKTACQTPALRDETLQDAFVMAINRTLHKKDEIIRICEATMEKRCDIQPLKEEQKKLQAELEVTRGLMERLITLNATTVMDQDEYNRQFAEYEARYNEIRQRIADVESEQKQRVGKRGKLAEYLETLKNQGIISSFNETLWYGTVEQVRVLKDGKLRFIFKDGSMVDC

SEQ ID NO: 97 - protein, 535 aa, synthetic construct
MSKEYNIGIYIRLSMADEDTGYGSKAESDSIGNQRMLINRFLDNHPELSHCQRSEFADDGYTGTNFHRPQFTQMMEKVKRGEINLICVKDFSRFSRDYIETGNYLECTFPFMGVRFISINDGYDSDDYKGTTGGLEVVMRSIIYAAYSKDLSVKTTSAKIQMMKQGKYVGGYAPYGYVLHPTIRNKLAVDPEAADVIRRIFREALEGSNTSQIARSLNDDGIPTPGQYFKNKHPDKKKFSNMSEKISWETVMVYNILKNLVYTGTLVSRKMKSCGVGSKKRVVNEPIIVEGTHEAIISKEDFELAQKVIRGGGRNPTRKQHDYPLKGLVRCGNCKRAMTRRKNKAGIRYFQCIHSVNNGNTDCPIGRSFPEMDIEKVVFHAIAQFLALAQKEAVQNREVGDLRKSAIKECADKIRTLQKQNEQNKASKLRLYEKYAAGSITKEAYIQQKAAADVKIAENDEAIQRSHERMKELDSETSCSDEKLDAVCDQYADCKALTYELTHAFISAVYIYDLDNIEIVWKFKDFLTTSEGEAK

SEQ ID NO: 98 - protein, 419 aa, synthetic construct
MDNDTSAYSGAKRPAYDRMIDDVRRGRVTTVLAWHNDRLHRSPKELEAFIDLINDTGAQVHFVTSGEFDLSTPTGRMIARQVGVLARYESEHKSERITRAHRQGAELGKYRGGSARIFGYNDDGYTLNPVEAEAIRGAYQAILEGKSAGSILRDWKARGLTSTSGRQFIHTTLRSVLLRKRNYGVSEYKGEIVGVGQWEPIVDEATFKQVEGILNDPGRIKNKSNRAKYLMSGLLLCGKCEQSATMGSYTASQKGVKVRYYRCRSCLSNFIRIDETDAFVAQLVIARLSQPDSEILAMPRAEQKADDDDLEAKARVLRARLTELIDMYASGEITRAQHQRAAEAVKTELSAVEARMSTTPGRTLVGELISSEDIEQAWANLDIAQRKELVSALVTVTVKPVGKGYVRRYQPERLEIEWT

SEQ ID NO: 99 - protein, 570 aa, synthetic construct
MRIRKVAIYARVSTEHEAQLSALENQVQYYDNLLNTHPDWILYKYYIDEGITGTSIKKRKHFLEMMEDAKKGRFDLIVTREVSRFARNTVDTLQQTRLLKRMGVEVYFTEDGIWTLNDEDGELRLTIMATLAQNESKKTSTRVKAGQMVSFQNGVIYGNGNVMGYDKIGKEYVIDEVQAKVVRKIYNMYLAGEGYQKIKKQLEYDHDLTAMGKSIWSFSAISSILKNRLYCGQLEYRKEYVPDYLEQKRAPNNGEVEKVIVEGRHQPIISKEEFERVQKIMEQKSPMIKRYHKNKGVYSNDLWRRKLRCKCGHSFLKTKWHVKKEITTYAYKCYSQNATGTVSARKKRGLSIEGICPIPMVQDWKLFTMAQSVFHAVFDCKEDTIQTAEEKLGNGIVDTEKVDILKDKVDTEERLKRERDRYNVLLEMRMNNEIPKEVFYAKREEVESKIAELERLLIQYGDIKEATAEDVADKLKNLTQVLEQGLELENGEFPENAINKYVYGVKVYEEHFEWILNLQVGAEEEADHVDTPVYFKTITVTPDDQRRWFKAHPAWSKSNKYEDLKVKIYI

SEQ ID NO: 100 - protein, 529 aa, synthetic construct
MKTQDNRDRIAAIYVRLSEEDHDKVHETDDSLSIQNQKSMLLEFASKHGWTVYDIYNDDDYAGADRSRPEFNRLITDAREGKFGIILCKTQARFTREMELVEKYIHGLFPIWGIRFVGMVDGADTSVKGNKKARQINGLVNEWYLEDMSENIKSSLDDLRRKGHHIGAWVRYGYMKDPNQKGHIIPDPVAAAVVERIFKMYLEGNSRADIARILNSEQIPPPGLYKIQQGDKYKNAFMAGEWDSCSISRILKEEMYIGNMVQGRQASESYKTKKLRTLPKEDWIRVIGTHEAIISLETWNQTQALLAVGARSFTRSEEIGLFSRKVYCGHCNKLMRTGRSKRKSGTYYNYVICVRRHPEINPCPVHAVSNALMEKTILDQLDILAAKYKDGSLFSEIMDEESTIGIEIKRLKAELAQHKKKLVEYETGLKCLYLDKASGSISNSDYQFLSRELSAGKELAERKVDLCTENYNKILRSQEILREKAGVLESYSRPKELTRSMVETFIDHIVICSSSDGTSKQEIKIYWNF

SEQ ID NO: 101 - protein, 532 aa, synthetic construct
MRQVAYSYTRLSSAKQILGHGATRQRENIEALCEARGWTLSDKTFNDLGVSAYRAKNRSEGALGLFIDAVEQGVIPQGSILVVESIDRLSREEVDKSLRLMLTLLDLGILIFTVSDQKLYRSGSPNAMLDIMTWLIVASRANEESAVKSKRIRDAKMRHKAQARETGRIITRQCPKWLTVNQSKTQFIIDEVMVKTIKSIFQWYSEGIALRGICDKLNAYGATWKPATITSLLINRKVLGEFQPLRYTEQGKEIPDGDVIPNYYPRIIDDTLFTQCQIIRESKKSRGRTASEPYANLFKGLLVCGECGSGIGLSTDRNGKRVYKNLRCANRSEVKCSAKRWKYDVIETIIIVALQHLPWNTGSRSASEALCASLSDSIEILNAEYQMLATKAENALEALIALPTNKILQAKAEAIDHDMQEKGERLVKLRAELEQADRVRLVDSLDHVDLHQVLDGLYSDDEDARAKTNLFLHKHVSEITMDTFNDDPKLHGRLSLRMTSGETASVEVWNDYKGYSITMSDGSQYWSEIERV

SEQ ID NO: 102 - protein, 528 aa, synthetic construct
MSNRPIAKPKAYSYIRFSTPEQMRGDSLRRQTEAAERYAALHGLELDDKLTFQDLGVSAFRGRNRAEGMLGEFLELVRSGDIAIGSYLLVENLDRVSRENALDALDALKDIAKEGITVVTLNDGRAYTHESLRQNPVDLMVAVMVFMRANEESATKAKRLREAWGAKRAKAEKQPLTKLSPGWVRLRDDRSGFDLIPERAAIVRRIFEMAIAGKGQQSIAETLNREGVPVFGRGKHWHRSYVKKMLGNPAVIGQFTPHRMEIINGKRVRVPAEPVEDYFPQAVSREVFEQVAALASGRSAPSKTEGAMANILAGLAKCPRCGSTMTRVNKGGKKGGHPYLICTRAKAGAGCTYRKVRLDHVTRAIIDNAGYLIGELPSPEADLQAQWDQLSLAHDVMGDEIERVVQAIAEAGHSPALLNRLRATEAERDRIANELSSVATRMADTITNRIANTGTALLDAVGEQPHDIPKVNAVLRQLFGKVVVDYRSGSLVFHWNHVPDAATSIVYGWPTETDDDDGIIPATSLPPS

SEQ ID NO: 103 - protein, 666 aa, synthetic construct
MKKQQKCYIYTRVSTSMQVDGYSLDAQKDKLRKYAEYQEMSIVGEYSDEGKSGKSVEGRPQFKQMLADVESGKDNVDYVLVFKLSRFGRNAADVLSSLQKMQDYGVNLICVEDGIDSSKDVGKLMISVLSAVAEIERENILVQTMEGRRQKAREGRWNGGFAPYGYQLVNGELIIAEDEAEIIRIIYDKFVNTTMGMAAIAAFLNNSGYKKKLRQNNTIEGFSTSFVKGVLDNPIYCGKLAFGRRKNEKIPGTRNEYHIVKQKDYLLSDGVHEAIISEEMWNQAHRKRQETGVLQVKTHSLEHEHILSGIIKCPVCGSGMYGNVNRKKHPDGGYYKDYFYYACKHRKLVDGHRCTYKRQWNEDRINAAVEEIIRKFVKNPKFEQEIRKQIGSSIDTSELDKEYDGLKDRLSQTTGAKNRLADQMDHLSVSDKNYDKKYNDMQERLDKLYDEITDIEDAMEEVETRLYNIRQDKISEDNVYQFLLFFDKLYDKFTDLEKKTFLKSFLSDVFIYEEEQKDGRILKGLRFKFPIYMNGRNVLGVDWDNESTDETVVLLSYKKPDGHINVKVEFGEGEGKVPLDNIAKRAEEYKPKERVTYKMIKEYIEAKYGFKVHTAYIAEVKRDLGLPMYDAPNAVEELKQPRKHPTAEKVEAIKDALRYFEIMEEI

SEQ ID NO: 104 - protein, 563 aa, synthetic construct
MTWGFGACMVVREEPHRAASAADAAQWTPQGPSLFACRRGAVMHEVEWSAAELKELEELSLREAQLPPEAPRALLSVRLSVLTDETTSPVRQELDLRRFALLRGCRVVGVARDLNVSATKVPPWKRPELGDWINNRAPEFDQILFWKLDRFVRRISDLHLMIEWCKEFRKILAADKDPIDLDSAYGEMMVTMIAGMARIEAANMEVRLESLWKYARTTERWVIGKPVYGYKSIETQDGRKLVHAPEKVRILRWVFSMLKRKKSMHKITQILNRAQIPAASGGQWHSANLWKILTNPALKGVRTVRPPGAKSKDISRIVYGTDGQPMRVAKHIFTDAEFNEIQNILKSRAKNGAGKNSKTSLFIGVVKCGTCGDNMYKHVTKKKRKSGKVAMYSAIRCASRTKTPCGGPSFPRADDIYGALSDTVLDQIGDYAVVHREYSRGAETLARTTELKESIKHYMSGLAPGGIYHDSGYVTKQAEETLQKLNAELGTIDPDSTVDRWTYNSKGVTYRQHWSSLGVQQMEEDLVRAGITFVLHEGHADLLIPEDVKKRLVVKKDYFKKKI

SEQ ID NO: 105 - protein, 456 aa, synthetic construct
MYTALYLRVSTMEQADNNFSLAAQESKLRAYAEAKTLSNIKVFTDPGYSGSNMNRPALTQLLESVKRNQVSNILVYKLDRLSRSQKDTLNIIEDYLLPHDTNLISLSESFDTSTSFGRAMIGILSVFAQLERENFKERSRMGMIQRAKEGKISGYGGKVFGYDYIDGELIINDYEAMIVRKIYDYYVKGLGVTKIFMQLQKEHPNVIKSSHHIWQILRRRTYTGDFDYMDESYEGIHEAIIDKSIYDQVQVLRDSRNSKQKSDAVYMLTGLTYCKCCGYKMQGTVSSSTYKDKRYERRYYKCNTNKRNKVNHNPFRCNTKSIKKDELEHAVISQIKALDIDLKIDDIQTNTIDDKAIDKRLNELEKQSEKLLNLYIEDSISKSILDKKLEEINTEKEALENTETEDNQSKLQALELAKEFNFDDATDYELQNLIHLLVKRIDVDNSSVDIQFIFSV

SEQ ID NO: 106 - protein, 502 aa, synthetic construct
MKKVAIYSRKSVLVEGSVSIETQINMCKDYINNKFPNAKFKVFEDEGFSGGNTNRPAFQKMLRMAQLNEIDIVVCYKVDRIARNTLDFLKILELFKENNVELISISEGFDPNTQMGKVMLTLLASFAEMERTNIQQRVKDNLLSIAKKGKWTGGSPPTGFKNGLNGGLEWNKQDMILDVFNMKYEKEKNSNIIKYIKEKYNHNFLGGTLATTLRKPIYVKSYPSVSLYLKTKGYIVQGDEDNIHSYLTYTDKETKYAIVSDIVGLIEPSVWISINKDMDKNISREGNRFSEKFWLTKTIRCKYCGQTFCGQTKTTKTKYYNKYGEEKIYISTYSYYSCRDAVRGKLKTCKNTKRVKQEILESKVSELIHLLKDKKTFNSLYFSNKIDNSSKIDTIKKQIKNIDKTINNLTDKIALLSNEASLIFISKLEELVKEKSILKANLLQLELQELNSNNKKDSSLVYNNILAFNDDLSVDDKRKIAMSLFKEIIYDPETDSLDVTFM

SEQ ID NO: 107 - protein, 556 aa, synthetic construct
MNANVIIYCRVSSDEQTLGASLDVQEERLRKYCNQMGYNIIDNIPYREDESAKTFEKRPVIQGIMNYIRKNKGRVNKLLFLRWDRYSRDIISASENLKELLKLGVEPNAIEAPLDFNSDTWPLLLGVHIGSAQCDNIKRSKATMDGIHGTLAKGKCANKAPRGYKNVRISKHETHVEIDTNTAPFIQAMFKEVAKGIETPCYIRRKFARKGYNIPESSFLEMLRNKFYIGKIRVPAYKGEPEYYVNGEHEAIIDKETFYKVQEILDGKRKKTPKLSKAINPDLFLRKFLICPVCGCALTGATSSGNGGKYTYYFCCNNQKHIRMRAENVNEEFARYTAQLKPNKTVLDLYNEILKDLQSEHKGESKKEVAALQNELSTIPKRINSIEDKYLDGDLTKEQYNRMLERYNKEASAMQQQIEMRENPNRSNIEPKLNYSINLINNIDSYIRNASVGVKIKLISSMFPQKIEFDGKTYRTNSYNKVLDLIYQQTNELRGVEKKNGESFSTFSASVPRPGTSHRNHRKIKEFIFLIINYLNISYFLYFCHILPIFRYSVHF

SEQ ID NO: 108 - protein, 471 aa, synthetic construct
MRKVAIYSRVSTINQAEEGYSITGQIDSLTKYCDAMGWVIYKNYSDAGYSGGKLERPAISELIEDGKNNKFDTVLVYKLDRLSRNVKDTLYLIKDIFTKNNIHFVSIKENIDTSSAMGNLFLTLLSAIAEFEREQIKERMQFGVMNRAKSGKTTAWKTPPYGYTYDKENKVLLLNEFEATNVKQIFNMIVAGHSIMSITNYAKEHFAGNTWTHVKIRRILENETYKGLVKYREQTFAGNHDAIIDEELFTKAQLALDKRTNSQNNTRPFQGKYMLSHIAKCGYCGAPLKVCTGRPRVDGTRRQTYVCVNKTESGAKRGVNNYNNNKVCNSGRYEKSCVEKYVINELSKIQHDKEYLEKMKNNSKKVDVSSLKKEIKSIDKKINRLNDLYVNDFISLSKLTEEIKKLNKLKEGYHKTIKLNYVENKNEDVISTLVNNIDISKSSYDVQSRIVKQLVDRVEVTTDNIDIIFNF

SEQ ID NO: 109 - protein, 503 aa, synthetic construct
MKKVAVYARRSEEKETGESIQNQLNICKRYAENYYKDASIDEYFDDDYSGRNMNRPEFSKLMKLVKKGYYQSIIFWKLDRVARNALDFLALHKELEKIGVNLVSVTEGFDPSTPAGKLMMTMLAAVAEMERKNISQRVATNMNEMAKQGRWTGGTVPFGFKVNSIEGKKYLIEDENNIKIASKLFKKYLEEESLYTVSKWLKANYAINKQPTSIKRILQNLVYVQADNDIYRYLQNKGIVLHGELNNNGLLSYGKTNNTKEEGMEFREESEWIVSVAKHKGVITGAEYIHIQKTLEKKTNSGRRGTGEVTYLNGLCRCAYCKGYMRTKQKKNPNGSIYRYFACGNRDSGRNDCKNIMVKISDVEETVLDKLYHYKVGSVQVENDLADTSILKADLDKKKRQIKNLVMKISLDEELEDIFLEQIKELKNEVTEIEKSMDDIERQNLMNDVDSYNREAFLDNLKNFKDLFERSVDVETKRKLVKSLVKRVNIDGLNKIIELDPYF

SEQ ID NO: 110 - protein, 521 aa, synthetic construct
MVGNNRFKVGIYIRLSRDDGNIESDSIVSQRSLLNQYVKENNYNLIEEFVDDGYTGTNFDRPAFIRMMKDIEVGKINMIITKDMSRLGRDYIGTGELIEKYFPNNNVRYIAINDGIDTFIDNTNNDIAPFKAIMNDMYAKDISKKVKTSLHSRMKEGLYVSGRCPFGYMKDPNNKNHLIINGEQAETVRLIFDLALKGNTYHFIAQELTKRKIKTPASYYNYVWNTKCINTNCISQEYGVWVDTTIKSILTNQIYVGDTVQGKTKKINYKLKKTVKNKPNDFIIVENTHESIIDRDTFNYVQTLLPKNVKRPEKKRFYLLDGLLYCGDCKHRITIRYQNKTGRSYTTCDYYRTYSKYHVCTTHTNNYEVLESVILDNIKEVCKRYLDKNIIKNSIGSLEFEDNILKIKKQIESLEMTNNKLITNLDKSYMDMLKDIIDEEQYVRVSESIKKEIENNKLSIDNLKNEQTNSNKIDNKILEKHINEFLSLENPTRELIINLVEKIYIYQDKTIDIIFTFKNVT

SEQ ID NO: 111 - protein, 641 aa, synthetic construct
MIYAYCRVSSGKQLEGLSMSLQGDEALLSKLAKDYNTTVSERVYRDEGKSAYKGEHLRGELGKLLADIDSGVIKDGDIIVMRHLDRLSRLDFSKSMNLFNGILGAGIGIYTTMDSRLYSNKLGNSEQAIYNALAGFAFSTANEESVRKSYYINKNALAQIERFQRGERTACGHAYDIGVGHHPFWVTTRTDDGVGIKNPPVRVHTENYSIAKELVQYALQGNGITRCQQLLEKRGLSYTKQGIRNIFESAALYGCLKISIDDKQGARTEFELDGYYPAVCSKEEFYKLRAERKKRTVSNGNRKEYSLLSGARMLHCGCKQSLNVHHSKNGAKYYICASQNHNMINCYTLDNLVLNALKSKVFNTEIDDTRLKALEAELDVISTAYRKKQKFVFDNIELFGDAIKSELSTMKAGVAKLESKVEAERQAVMSAKPAEILDLSTYDKWVHQISEIVDADSEIKRIYSQKIKQLVNDIVLHDDGLVVIEYVDRSKDYYYFPENKRKKQGEFWAVKLLVTDDDTTREMVLADEKMAVFVFSTEEIKARKYVNDISDFKAGLTLFSRKRTTDTAQKRFANQIKEYLGNHGELEYKRSEVVKLGISESRWQKLKDTDLTKYGIGFKSKESEMVNGKSSVSKLAFLMEE

SEQ ID NO: 112 - protein, 532 aa, synthetic construct
MKAGAKIYLYFRYSDMKQENGDSIRRQRECAQRVADKYKLEIDEESVITDRGVSAFYGNNAKKGNLAGFLKSVEQGEIEKDSILIVESFDRLSRDAPRDAHKLFDKLIDNDITIITENDGLEYNKETLAREPSRLFMMIGTMLRAHEESLTKQKRAIESIKGKVKEFRESGNVKSIGTVPHWLDYIDGSYVLNSRAENVKLIIDMYLNNEGLKSISRKLAEKGIKSPTGKDRWGITTIRTILDNKALYGFKEFEISYLVNGRKVKENFELESFYPSLISKVDYLVIQEKKNARSNSRESYGEVTYLLSSYGKGKSVCAKCGYATGTQTQKQINRKGKYMQSVMRLHCKKHSESGDCCKSFKCAELEKHFIYSIYHELDPEFLMKYKSKKVNKEGLKAEISEIDRQIKVLVSSMIELNNADLTTVFQEKLSDLNEKKIKLSNELNQTNDTKNEGDLKELKTLALKCLDVKNSVERKKLKNIIMQVLDKIVIDFETKSLSIKFTNGNVMNVYFDEKSKSYCTSLFRSKIIRRKK

SEQ ID NO: 113 - protein, 503 aa, synthetic construct
MSKIALYIRLSVEDMIKTDESESIINQRAYLNDYLDKNEEFKNFTREEYVDDGYSGTNENRPAFQRMLEDVKKNNIQTIIVKDLSRFMRDYITLGDYLENIFPFLGVRFIAINDGYDSDKEKGNGTDLDIQFKGLLYDFYTKDISEKVKSSMTTLKKQGKFLAWSPPLGYMKDPNDRHKIIVDEETAWIVKKIFKLALDGISSRNIAKILNEEKIPTPSKRKSELTNLDFEYSIIRTVKKPRPTWTNGNVIDVLANENYTGTYTFNMQDKSVLNPSSFKFKPKEEWGRVENNHEAIISKEDFEKVQKIKEKNLFMKGKNTDYEWRKKSPLQGFAKCPTCNHILGCVQSKHKRPDGSLRVHTYFTCRICKCNNVKHKNSRAGSLEEQVFEAIKEKYGLEDSNKDEKVKVKPMEKSIEDLEAKKMQNFEKYKLGKMNRQKFIDSKNSIDEEIQAIKEKIEKAKEEKEEKEEKEVIDNTKLTRELMEKYIDSVFCEGNEVLNIKWK

SEQ ID NO: 114 - protein, 554 aa, synthetic construct
MQIAPPKPGAGTRVLGVRRISHDTEASSALVRQKKEHDAAEKRFGFHMVGDVEDATVSGSVNLADRPSLGKWMVSPKIHEWEALMVTAQDRITRDDWEWMAFLLLCREHGKHVIILEEPSFDLYDRSSRMMSHFRSYKDSEYLDSIKKKKRDQVQDFRENGLWPGGNWPFGYRTEKFFHEPSGKFRWKLVIDPVTSKLVREAYSRIVEQGWTTGRLVSDWNKRKILSARDYQRHVNALEGRENVDVEVKGTFWSHGSMTKMLSKKQLIGQRVHKGEVIMGPDGLPQKFCDPILTQAEFDALQAILKARGDRYRGKEKVGSGDLTGVLYCLCGRKQHELYSQKKATKTQPAIKNYYAYFWCATKPATNMDACRFGLCWPQEQVKAELESAFLHRLGSIEIKHKSFKPGVDNRPQIEEVKKGVDRLTSRLLKFDEDDPRYIAAEKLLEEHTATLKELEKNPVVPSRWVEEGTGVTFGKRWGEMDWEQRGWLLKGLGVRFISAGTTKKPLYFLVHPDDVVEKAHHAAGGIVDALNQEVWLKKVEEFQKIVAAMQLTA

SEQ ID NO: 115 - protein, 513 aa, synthetic construct
MNQTPRAYAYVRFSSSKQKDGDSIRRQLESARDYCKRNKIFLDEREFTDFAKSAYRRSNIKKGSALSAFLALVDSGEIASGSYLLIETVDRLTRADVYSAVTLFGSILQKGILIVETAKNQVYNEKSLTQFAAMLSIMSSTLVAFDESSKKALRSAANWDRRQTNAREFATPLTRECPRWLRVSEDGKKYEVLQDKVRSIQFVFELRKSGLGATAIARKCNELKLSVPGKGDIWHLSLVNRLINNAALIGQYQPYKVNESGRRVPHGDPIPYFYPSVISTALFNAVQQINNKSKEFPKKRDSAYRNFLQGLLFCSCGASLHRKLKSRLDLDYSRYYCSRSNLNATKCPSVDCRRIEDTVMFFMSEEAPGLVSLDDFSDKLLDAENSARESIKKIDAQISLLLNLVQAGKAEDTPASILQRISDLEREKTVHQKIAERMLLETKDTAVYWGVKADEPFVNAIRSADSEKLSLLRYQISRIVSRFDLSEDLSSLKVTLKNSKTFEISVIRQYFDF

SEQ ID NO: 116 - protein, 620 aa, synthetic construct
MLGIYCRTSKNRKDKYTIDDQRDGGIKCAKKLGLEYEVYVDDGISGTLDESVRDGLSDLFRDIRKDKITHIYSIDQSRIERRSRTWDFFVAECLNKKVKYYPNGEFFDLNNSANRMLASLMSVVNAYYAEITSKKVRLANARKAKEGKTHGIKPYGYKKSSNNDYVVDEEEAVHVRRMFELSLEGRGAYTIANIFNKEGIPTKYSRNFKGKITRKDSYTGITTTHDKSSIKWRGNVISDILRNKIYKGIREWNRYEDKIENVNGKSVKSKIKAELIISQVPNIVEPELWEKVQDNLAVNKINVGKKSHYNYLLNGLITCNHCGRLFVGKRRKTSRDNAYKCKGKVYPNSNCKASRSINISKLDSFIIKHLFKSKDLKRYLKSLPKPESKHEKIKENLEKEKKVLKRIEKQLDKGYKLLFDEESEFKDDEVVKSRVLVLKEKKEEQIELIDTLEEEFVLSESNFRANRTERLLNEYTEESSFEDIKRIIHSLIENINIKHYKEEGKMGVFFLNVKYKGYDEVSTFMTNWKANKWCWMSKYRKKSKTNEELEEDREMDIALLEYYGIDKDNIDIKGLQKERKLPIGEIDKMNPFSIEYQGAEIKEFKYELIELSKDEIIDFN

SEQ ID NO: 117 - protein, 505 aa, synthetic construct
MKDKLNKIKNVAIYLRKSRKSDGLNVEESLKAHRDTLVRLANKYKWNYTIYEEVGSSMDMAIREELQRMLLEVERGIYDAVVVMDQDRLSRNRYDSAVIKKILLDTYTFIVTAEEECIDLRDASDSLMTDFKDIIASYEYRQTSKRLVRGKDASARKGNWAAGRVPLGYKYNRDTKKLDLEESEARIVREIYKLYLEGEGIREIAIKLNKAGYRSKTSKLFGNKGIWDILKNPIYKGIVRQRHYAFESKSHQYLRDESEWIVHKDIYPRIVSPEEWEEVRKLAEKRSRLPYKARARKHGLTGLITCGYCGQKHGIQWRAQKTKPYRTIKTCWKRSLETGELCRNKGLRYDEVLEYIISKISERRSIIREEISKISSDVSEFTKKKEEQKVKLKEELERVEKQLSRLNYMFINEILSEEEILKEKPPRMAEKEEIERKLFELEGETQESNVSELKFNLKSLERIIRDYRELPDKDLNDLLSNVITNVELFNYNGKDLEPRISIEFK

SEQ ID NO: 118 - protein, 603 aa, synthetic construct
MPVAYSYIRFSTAEQKKGDSLRRQAELSEAYAAQHGLTLDTSLHLRDLGLSAFDRSNVVRGALGGFLEAINRGRIAAGSYLLVESLDRLSRAQVLDALKVFISILEKGITIVTLADGMVYNTESVGSNFGSLMFSITIMARAHEESATKSRRLKAAWTSKRKNIGTKKLTGQCPRWMGLNADKTEFELVPDRVALVREILSLARDGIGQAQIAKRLNERGVQPFSRHGKGWHGSYVHKIITSTALYGEMQPHALVDGKLVPQGDPVPNYYPALITKDEFHFLQSARSQRMVGGAKARKGTDVPNILSGVAKCGYCGSSMIMAGASVRKRQADETTPQKKVANKVLVCDGGRRGLGCYAVQWSYKDFEKSFLTFCRSLDLRQLLGSVDINAEERLVQLTVGDQLHSVQSSIAESRKRMDRLMEALELGDVPATVLSRIRELEAEIAAASEREKALKAQLQAVESSSRYRSVEMETVRELVGQIESLTGDQLFRVRAALAEHIRRLIEVVKVYPAGFLETPERIEQLRAELIGSGFSAERADAYIADTFRTEPKRQGRGVRGRYASRRDMGRHFLVKAKTGGFRVVYPDFDDPSQVTVEMGGNGG

SEQ ID NO: 119 - protein, 582 aa, synthetic construct
MRVALYARVSTQRQAQADGVAQQLDRLQAHAASQGWTVVAENIFRDDGYSGASLKRPGLERLRDRAALRHLDRVLITAPDRLARHYVHQVLLLEEITATGCQVEFLDRPMSQDPHDQLLLQIRGAVAEYERSLIAERMRRGRLRKLQAGLLLPWTRPPYGYRVDPDRPRDPAGVRCDEAEAAAVAEMFAWYGEEGRSLYGLAQKLLSDAIPPPRVKGRWNVTTLRGILTNPVYTGEVFAGRIQTAPRRLQAREEWIPVASIPTIVSQESFDRVQAKLAQNRQFARRNNTAHPYLLRALVSCGVCGLSCLGRCLPAGHRYYCCRGKLSPVNSHRDTPCPSRFIPASQVEALVWEDLRQLLTDPEAIRHALERAHGGHWLPQELRARRETLRRGQVSVAQQIERLTEVYLAGVVGLDEYRRRRGDLEQRQQALAAQEQQLAAQTERQADIARLGLSLEEFSRRIRQGLDQATWEQRRQLIEWLVTRVIVTNGEVEIRYVIPTSPAAQTGGICHLRSDYREWLQPTQTSPRLRTHRPRTSGSATRTHPACPDPQPHAPRRSRMSLSTEQMAVLATISDRPNTSKP

SEQ ID NO: 120 - protein, 477 aa, synthetic construct
MRVAIYARVSTDEQFKEGYSIDSQKENILNFVKSQGWEVHDFYVEEGVSAKNLKRPSMQRLIQDTVDRKFDVVVFYKLDRLVRSVSDLDSLLQLFDENKVAIRSVTEPFDTTTAIGRFLITLVAAIAQWERETISERVVINMVKKATLGERNGGRAPYGYRLKEGKLIINDEEARFVKDIFNLYTSGKGIRSIVLYLNQFGVNKDIRTISRMLENPVYSGRLRWANNSKMDSITSDGLTHHPIINLELYEQTQQLRNQRAKEGKKATSPYPFSGVLKCGRCGSSLSGYYKKARGSKHYICIAKKNKGTCDLPMFTESALTKVFLESLSPDNAEKFLSLTSNFELESPKEENNDNKIKELEKELSIIKTRKKNWLLALGNGVISQEEYLTMTKDDTKNEDVIKEQLSGLSPQKVVIDKDSILNLLLSLTDLWNTATDYEKKSFINELFKNIVVDVPADYYRAPGKTPTVIIKEFTLSE

SEQ ID NO: 121 - protein, 445 aa, synthetic construct
MVAVNLLTSITLAGIKVVTLVDGHEYHAGSDAMDIMRAVIVMSRAHNENKARAEKLRAAWADKKRRARETGEVLSRRGPAWTKFDERSKKFVLIADRAKIVGRIFDECNQGLGITAISSRLNAEKVPPFVKGSDGWHQGYVLTILRSPSVCGYYQPTLTTNNPGQRMGREADGDIIENYYPRVIEDATFYTAQDMLARRNKRGGGKGRRGKTFANLLLGLGRCEQCGGTLILGSRANSSAVRHFRCYQQSRKHNCDNTTRYLATDVEDRLMYFLMRARMNEDRAAPDTAALVVKLAQIDDVKRRMETLLDQLEERVPGVAERLASRRDELTVLEQEAAELRMSVERRSKTRGDESIRNTIEWLNVVEGEAPDADVYLARAKANAMLNDLFDFIMPADGGIYVGMGDRFRWIGEDMMTFDIPMPNIEGTITGKELGDYRGPVEFAV

SEQ ID NO: 122 - protein, 511 aa, synthetic construct
MKIAIYSRKSVETDKGESIKNQIEICKEYFLRRDNNIEFEIFEDEGFSGGNTNRPAFKLMMSKIKMFDVVACYKIDRIARNIVDFVNVYDELNKLGIKLISVTEGFDPSTPLGKLIMMILASFAEMERENIRQRVKDNMKGLAKAGRWTGGNVPFGFISERIEEGGKKATYLKLDESKKQLIKEIFQMYISTNSMHKVQKQIYNTKNIKWSLSTIKNILTSPVYVKADKDVVKYLNNFGEVFGEPNGHTGIITYNRRPYTNGKHRWNDKGMFYSISRHEGVIDSNIWLKVQSIQEKTKISPRPKNSRVSYLTGILKCTKCGSPMTISYNHKNKDGSITYVYLCTGRKSYGKEYCNCKQVKQTILDKEIENALNSYIELNIEEFKKVVGSPTDTENFNKKILCIEKKIETNTVKINNLVDKIAVLSNTASVPLLSKIEELTKLNEDLKKELLFIQQEHINNSFVSPEEKYERLKQFSTTLNTNNIDLKRELLSFSVQEIKWDSDAECIDIII

SEQ ID NO: 123 - protein, 523 aa, synthetic construct
MNTYGYIRVSTEEQKKVEKTGVQRQLKFINKCAKSLGCDNPIIIDDTGMSAHASSSKKKTNITHGKLRKFLDDVAKGKHDGDVFIVEDMDRLSRDNDAGTLALIQMRQGGVTVHTKDGVQGKELVSSLLTTVKLALAQQESDAKSHKIKGAYREKIRRAKAGEKTPFNQIPHYYYWDKVKKDYFYHDYYKQAVNRAVDLYLDGHGYGYIAKVLQDEGYKGSARKSSEWLGSHVSTLLHHKSLHGDFHINGETIVNMFPKMMSDEKYTKLKLALSQREKFGRGGQKFGQTLITALGGITRCGDCHGAVVKNRDRFGRYVLKCPVCSRGASKEGRKASALLGYIEEKVFAVLAFDFKPHMNKTDSDVDDRINSVLVDIKAKEDSIQSFFDMIEENPSLTAMVGERVGKLNREIKSLNGRLKELELEKSAEDIDDDVYIKLIELETDIFDKKCQESIALARTYISKLVNRIEVFFNGQGDCKNTVTVTVELKDNTTFEIELCRKKKDAVSLIVRNEMLNNGMAKLI

SEQ ID NO: 124 - protein, 475 aa, synthetic construct
MTVALYCRVSTDEQAEHGFSIDNQKERLIAFCKSQGWDQYRLYIDDGYTGTNMDRPALQRLIKHIKEKKIDTVIVYKLDRLSRKQRDVLYLLEDVFDKNNVVFKSATEPFDTSTPLGKAMLGILAVFAQLERDTIIERLSTGQKLRVKSGKFSGGRIPFGYVYNSQTGKFEVSPHEAFLVREVYKKYLQGYSLSDLSDWIESQTSARYWDHARIRDMLTRETYTGVMPYGTLRSTEIAPPIIERELWEQVQQEMVRRREGFTPKGEYLLSGLLRCAECGSSFIHVIRKKGPYVYYLYGCRSQHQRPKKVPRRAPKQACTVGYRNREELESWVIEQVKRIARLDAEEFEHQIANIETNSDETEDTLRDLRKNLSDIEHKLNRWYEAFEEGTIDATQLRDRIKHLEEERRRLQTNIEELQDTLVKDTQPQRVFNAAKLIEEAWDYMTFDEKKNVLRAAISYIEIPRKGQPPVIHWNV

SEQ ID NO: 125 - protein, 489 aa, synthetic construct
MKRVAKFIRTSTLDQHTSIDNQSEILDNWIAQNNCILYKTYNDEGISGTKKKFRVQWLQMLEDAKNKEFDILICKSYSRFGRNQIETLQAIKELRENKIRIVFLEDGLDSMIDDSRFGLMAWLSEEESKRTSKRIKGVFSHFKEVGKIYNCIAPFGYDYDINKKNFVINKDESEVVKRVFRLYLLGNGTNKIANILESEGVPTKNGGKWRGNTIKNMIRNEVYLGTLVQNKSSNIEVTNSKRNFHNEDEYIKHLNNHEAIVNEETFIKANEIFKKNSDKVKNRSVGVRASNTSLFSNLLRCGSCNSSMSIRRKSKRKPFYNCIEYERLGLKCGHNSNFIQEEFLIEYIEQKLNELIENNFENIKIIEKNDIKKTLENDLKNIQKKIDEQINLANNLLKLYNNKMINDIQFKLQNESISNMLNSLIENKKIIEEKINNLPKKNNEFKKDVNNVVSLPIAQWSNAMLKKIIDKITVGVDGTIKIDWKINKM

SEQ ID NO: 126 - protein, 528 aa, synthetic construct
MYTPQSLSEHYSQITTPQTEQPLAILYSRFSSRNQVGNDSINRQLEGAQKFCEYHNLKLSEANYSDLGISAYKDNVREGLELLLNAVRDGTIPANSWILCHTTCRLSRKGFQHVLKLVSELVATGCKFCTINDNQVYDSTNINKLSSALPLIISADLAFSESEKKSLMIKHAKEQTRKNRKIVGKQPYWITLQDGKPMLNDFSTIVKTIIDLRLKGYSAQRIAKQLNADGHLSPTGKSWGAAAIRKTIDNHVLYGAKEYSEMKDGKLVPVEIVEDLYPALCSKSIWLQIKYEKGTKEVGKRSKSSPFSKLLRCACCGSAMTTRSTYQKGVKYDYRVCIRSTEGSCDQKSRFRDLDNIILGELKHLKYEVKTHATVEVDSIKVFQDKLTLLNQTKELLQSNPTALAAIYADIAKTEQELHEAKRTKELLESQPNEVNFQAIVDVEDQSQRNVLLRRIIESIEVKRIDKEKLVSQVRVVVRFKNSHTQTFVVCYRYRGYDIKWLTDTEKYKEQLNAFVNDAVKQLEEWEK

SEQ ID NO: 127 - protein, 503 aa, synthetic construct
MLRGGYVEQEIDLYLRRSKITREGVEALTFKTQEERGRAWADQHGYHVRKVWKDNLSAWTDVKRPDFIKALGALRRKEVPALWCYAVDRFDRQGAGSVIQLLDSGARIIFDYERLDSAVQRDRERIISDAERAKTVSDLLSHRVRDTKQGQRRRGEWLGAAPFGLRKDKSGKLHHDKHWDTVVRLITDVADGHAPRAVAQRLTEARRESPRGGPWNASTVRRIVHNPVYEGWQVVAFSRKYTWPVAYRNEAGERVRVFADGVEPVPAELVARARRVHAGHQRGTLGSRVGKASHLLTDLLRCAGCGAKMPTSGRSYVCNGHAMGKPCPAPASAMKARIEEYVYAEWLAKVSSADVAAGDPLMIAVAERWAALTAPEETEAAHEALAAVKAAEAAIERLANDRAKGIYDGAMGKHFPRLVAEAEETLKEAQATADALTGRNVDLTMFDDDELLQQAWNGADLPMRRDLLRVAIDKITVTRADRRGAPFDGDARCTIEWATPEED

SEQ ID NO: 128 - protein, 510 aa, synthetic construct
MNKAYSYIRFSTKGQIEGRSLKRQLENAQEYANSNGLELQSLSFRDLGVSGYKGKNSTDGELGKFIEAVKEGVIEEGSYLLIESFDRMSRQPVETSLMLLMNIVDLGITVVTLMDRQVYKKGEMNMNALMLSLVSMSRAHEESATKSKRVGDAWHKKQSRAASEPMGSPLPSWLHYSDDKKEILVSEVKAIIVRYIFLLSAEGYGRAAIVRRLNNEGIPPISSRASQWHTSTISKLLNGRMVLGEYHPHVTNSKGKREATGEVIKDYYPQVIDEDLWYKSQAAIKSRRIGSTGSIKKGLTRNIFSGFISCECGSSVQFVNKGSSPKGGYYLVCSLARYGAGCKYVSHRYYYTQWVILIALQKLLKTYAKKPEDTAKTLSLEGESATLQKQIDKLIRDIDENGFSTYISKAIRDKENRINEINRELADIQAAKAVNNESIDITELTANINEQSERLKLHQHLKRQLKSIVLYPSKKSIDILVNDGDDIHLNYDEDTEVWTSGDGMSFKVEA

SEQ ID NO: 129 - protein, 580 aa, synthetic construct
MTATHDTTDPTRCAALYLRRSHKNADGDARNGRSLAEQESELRDLAARLGLFVTEVYVEREGTGASRYSLKARPQWMRALAELRAGDHFRTLLVWALDRADRRGAVEIGRILDEHADGSRRIVGVDGTDTADSRRRLEHIIRAELAREEVENLSRRVSRAKRFRRAEGRWLGGAAPYGLRIVDGHLEHDPETYPTARRIADELLAGRTIWQTVKRLNDDGVPSPRGKSWGVGTVSTLVRSPAWAGLQGIREKTASGRWRHIAEPFRDERGQTVSVGEGVITPGERARILQTIGDRSATLAEGGRFVRRGDRRSAALLADVLRCADCGGRTAQSGAAGKKVYRCGTYGNGRACDGFTAPTAESDEAVSIAFLGRLATLEAGDPLLEAVADAWVARVAPDDIAAREAAQDALDAARADLARVRRLVAAGTFDEADATAVMPELRANVAAAEAALARIPVPDADISPLLDLAQSVPAFFDLPEHERRGLIALAITNVEASRARSRGVRFDPTDRLLITWADGTTSRPSPARVDQRAERIAKVCAMLAADPAVTIAQVAEAINRSPRTARDVLDTARASLADTH

SEQ ID NO: 130 - protein, 581 aa, synthetic construct
MKKLYSYIRWSTDKQTGNTSLERQTEKAKQYAAIHGLEYVQLLDAGVSAFRAKNSTSGKLAGFISAVESGVIPSDSWLYVENLDRLSRADATTANELFLRLLRLGLTLVTGMDGKTFTRDSVNQNPTDLMLSILLFMRANEESLTKQKRAFETTLKLIERYRSGLPVNIKSAGSSPWWIDASGPNNEAVKQHPIHFKAAKEAVRLLLSGWGNYRVTNYLNDNSELYPPPTGKKSKNERKEVRWTVPNIKKMRLNRALMGEKVLTLNNVTHHLENYFPPVCTPAEFARLQDVASNNKMPQGEQKQVITLLSGMGILRCGHCGGAMTSFSKQGKIRYMCESGKKRMSSCRAWSVSGVLVERCLLQPLITGYISLVMDKQGSEQSISGLIDSKRGELEAIQSQIDNTTTAISMGGNLGSLVAMLQGFESRKSTILVDLDKLTQRELLQGSRGQQIEKIVDTMDLIIPELLEDTTDPDRLNIREVVRAVIDRVTISKGEDKVLRLIFDGYGHQRFIFQGEILADDRGRVSRGYSLHIEDRNVEMHDGIEPALSLKFGELIKAQHDKVDEMLSAFPPLKASWFVSK

SEQ ID NO: 131 - protein, 472 aa, synthetic construct
MRFLARTRLSVFTDESTSVERQREIITQWATVHGHTIVGWAEDIDVSGKLSPFDTPQFGDWLKNRYPEFDGVVAWKLDRLARNMFGLNDLFQWAKTNAKTVVSITESLDLSSTVGLMVAQILAGMAQMELEAIQARQSGSQAHLRQVGRWPGGNPPYGYRVVRNGKGCKLDADPDKAAVVNTIVGRILDGSTMASVCRELNSAGVPAPKGGKWQVSSMRHMLRSPALRGHRVHKGEVILGDDGQPVMFGPELLDAETFHRLQAALVPGNGAGSRRNASPLSGLARCAECGAAMGYESSRGRDKRRRYYYRAKCDHRPAMRADQLERLAEQALMLAKGDDEITRREWIPGEDHTTALQDAVARYDALSERLTTNLPEVAKQRLEKQLAAVEAELGRLSALPQVEGHWGQVGTGRTWAQAWDESSVDERRKMLTDAGIEFAVRRNEVTVGDRFRAIKTDDVEDPFVVIPPPVRT

SEQ ID NO: 132 - protein, 476 aa, synthetic construct
MKASIYIRVSTAEQAAEGFSLAAQQQRCTDFIKSQGWELGEVYKDDGYSAKDLNRPSMQRLIQDVKSKKFDVLVVYRLDRLVRSVLDLHQLLNIFDEHNIMFKSVTEVFDTTTAMGRLFISIVGAMAQWERENLSERVKMGLERKFLEGKRIGGPAFGYRIDEDGKMVIDKEKAQIVRWIFNSAKKMGINKIAKILNKQGIDSPKGGNWTGSKVAYLLRNPTYTGKIRYLVNRNGYGEKETIDSNHPALISEEEYNEVQEILKKRHGGRKKAHTSDYPFSTILFCTRCGSPYSGARQENKSGVTYYYRCNGTARGICQASTVLEERLVDELLNKINLIIEESEVTLESEKGETDNEFRLKQIEAELQRIKKRRRKWQEAFANDAISLEELKERMNEEKKKEEALMEELEAFNTVPNETDVSKDEIIVALKNLKEIWYHLSRKEQKEILNMIFSRIYIKTEGERPHIKPIITDYELL

SEQ ID NO: 133 - protein, 474 aa, synthetic construct
MKVGIYVRVSTLEQATEGYSIQEQTDKLKKFCDVKEWTVSDIYTDPGFSGSSLKRPGMQKLINDVEQQKIDAVLVYKLDRLSRSQKDTLYLIEDVFLKYNVHFVSLNENFDTSSPFGRASIGMMSVFAQLEREQITERMQMGKVGRAKAGYFHGGGTIPHGYDYKDGELIPNEKEAKIVNYIFDQYLDGWGVQSIAKHLNAKHISGKRSAKWSHKVVNEVLDNNLYIGKITWKNEIYDGTHAPIIDEDKFYKVQELMAKRKSTAAKNNQRPFKAKYMLTGLAYCGVCGARMFTLQSYSNKQRKYIRKYGCYSQSTVQHMVKDPNCDNDKYDGPELETYVLQRVKKLSMNPKTIKRITNQTASIVSTDGTKAQIKETEEQIERLLDLYQNGAITFAKIESRLDDLNAKKSNLEEQLKRLESEKLNNGSTTDVLDLLSTASDVVDSKDYDAQKRLVHALIQKITLKRDKVTIKWTF

SEQ ID NO: 134 - protein, 487 aa, synthetic construct
MTAAVYLRKSRADEGDPDALHRHRETLLAFAQEHQMTVAEIFEEIVSGESLYLRPQMLRLLEGVQEGRFEAVLCMDIDRLGRGDMASQGIILDSFRSAACKIVTPRRVYDLSNEMDETYSEFEAFMARQEYKMIVRRMRRGVMAAAREGAHVTEVPFGYVRAWEGKRPTLALHPQEASWVQTAFALYTGQGQGCQKIADLFNAAQVPAKKSAQWSRTSIRKMLHNPVYTGTWLYNRSKWQKRKKLEDKNKSIPRPPEEWICMENAFPAIVSKEQFQLAQELFQSRSHSPSHAGRRKNPLAGLVYCGLCGAKMQRQHQESKGIAPCLRCPTRGCSPSVPLEQVEQAVLLALTHHLSELRTAGALAEPKEGILIGAAESLAKELVRLESQKARLHDFLEREIYTPEVFAQRRSTLEAREKEIKEQLGQLCQREEKKEAPSGASVLEGYAALDAEQRNQLLKTLIRRINLIRPSPASSRSFSLSITLRGF

SEQ ID NO: 135 - protein, 691 aa, synthetic construct
MSKITIDHLALSAFIYVRQSTAYQVANNLESQRRQYSLVERARQLGWETVEIVDDDLGRSGSGTARPGFEKLLAAICEGRVGAVVSLEASRLARNGRDWHTLLEFCGLVGTLIVDEEAIYDPRSPNDRLLLGMKGTMSEMELSVFRQRSVEAMRQKARRGDLHLTVAVGYVKTDDVRVEKDPDRRVQESILLVFRKFAELQTVRQVLLWFRQENVLVPSVLQGRGKRPIEWKAPVYHTLHHILTNPVYAGSYVYGRRATRVMIKDGRKRVTRDTLRRNPKDWDVLIHGHHEGYISWAEFERNQHLIAENTNGKSYMGRGSIRRGEALLPGLFRCGRCGRRLHIQYSGKGGNTQRYVCRGTFGDMAAGNCIGFGGMRVDRAVAQEVLERLQPLGIEAALQAMEAHTQRHSDQHQQLENSIKQAQYEAARARRQYDAVDPDNRLVAGELERRWNEKLIQLRDLELQLQTLTGDRDTPVLSADDRTRLMTLGRDLGKAWDSPNASIETRKKIIRLLIKEIIVDIVDDTLALIIHWQGGDHTRMTVKKNKIGQTRWAVKADLVDLVRALARQLPDLSIAAILNRSGKRTGHGASWTRSHVCNLRNIHGIPVYREGERAERGERTLDETADILKVSRATAYRMVSSGVLPARQLCTGAPWIIQLSDIQDDAVRREADARRSRRPISQDPVQNPLLF

SEQ ID NO: 136 - protein, 542 aa, synthetic construct
MLLDYVKDNAVKLGLDPDNYEFIVDRGKSAFKGQHMENTSGLGKFFTRLVEGKIKPHSVLIVESLDRFSRQNPFLCMKYLSVLDEHKVELHDVDKKLIISRKVPNSLTFATMIAQRAYDESCLKSDRVKKGWNRRRTRAKDDGDYMIKNTPAWISVSDEKYVLNDNHKIVREIFDLYLTGIGSFTIAQMLNRQGKFISEFKWDTAKICRILRNVRCRGDYISNIIERDLDNDEVSISEITIPNLYPAIVSVHEFSEVQRRLDKHNFMGRIRGDSKKTVFNSLLKCSLCGAALALSTSGKYRYLKCFSAREKLGCIGTMMSYDAVEKAILTHIKNVDFEKIAKKQDITELDTIKGQVADLERYVKSFTDGFARLRDSGRTPTFEMMDQKAVAEEQLQQLRQVLLEKEGAVSISNINISSDIFDVKNIKERGALEIELCKVIEKIRIMNADGNLLAITISYFSNVLLHMLIINKKTGELLNQSSLEDIEGVTWLKSSFCDINLDTKEPVYYREPTEIDTLVMGLWGELMMKVASEMKSVQTNTD

SEQ ID NO: 137 - protein, 523 aa, synthetic construct
MRFFCYGRKSVFSDKSDSVDNQLRMCLDYCESKFHGKIDSWECFSDEDFTGANTDRPQLQLMFSRIRENAADALVVYQLDRLSRNVRDFSNMYAMLEEHGVMFISIKETIDTTTPIGRAMMFVTAVFAQMERETIAERVSDNMLGLARKGYWTGGNPPVGYVRKSIVEHGRKHVTIIPDPDGVDYVNRIFDTFLSSNRSLQGMETQFKNSGIKTLSGKFFSSTQLYKILTMPFCVEATPEVYDYYANKGCIMDPDSPREKWDGSVGVMVYGRTTGKNKKHQLQPPEKWTVCLGHHEPFMKADKWLLVQSRFSEHKCIKDAKWPVPLMKGVLRCKCGSLMSVSRKKRVDGSCSSWYYCRKRMRQGVSYCDMGQTACDKLDSRLISIFRDIAADPRLINQYLKKTEDKPLRDPKAILSSITSCDSKIGRLTASLALAESSSISKYIIAEIKRLDSEKSRLQKELTDIEHESKRKMTREKDSLKAIAEITRLISGLDGFNDKERNEIVRSVVKTCTWDGVNLFITL

SEQ ID NO: 138 - protein, 545 aa, synthetic construct
MAEHDTSVRSNAQIERRTHTRPSACEVELLLEELRGIPRDAPSLSEALELRKAGWHLVVAYCRISHDRHRRDGHGVEDQARHCARIAARHRMIVIHRYVDNDKSASKIGVRRPEFDSMVAALTAGKTTAGYPIDGVVCVSDDRLYRDVHTFQIFLRCFTAHPARVYADGLGTYDLYSEDAAQRCLLGAAAARAESTKQQHRAKLNHRARAERGEPVASRRTFGWNADMVTLNHGESEVVRSGVQSLLAGKTLTAVTHDFVASGYTTTLGNSWQRQTVKQLLRNPRICGYRKLHGLLIRDTDGKPVVGQWRSIVSPEEWHAVSQMLDKQRHPGGWAKNGPTPLDSGYLLTGLVRCGRPLENGRRCGAPMLGKPAKASYVYCCRPALDGGCGRVSRQGPAVDELIVQKVLGMLCGPAGESVLLVRPTLSWPGTHHLDIATRRKAALQEQWYAEEISDHEYFSQLKIEETSIKRLMTEQQMWALNRRSDTHEPVDTYARWDALSRSEQRELLSGLLESVMILPGTKGSHRFDPATVVPVWHATVRPSR

SEQ ID NO: 139 - protein, 519 aa, synthetic construct
MKTCDSLVRVSTKKQSTDTKTGLVRQSDNVQSWLSRNPDYELRNVIELKGVSGFSGKHLQGEFGSYLDDLENNVLACPDAFLVDEMSRLTRLPLQQGIALVNRFSALGVTLVFVAEGQTYSPSSSDDLGSFLALTVRLHQAHEESQRKSRMLRSARLQETKSYASGGLVKNRLPNWITISDNQYVVDEVKADAIRYLHKLYQSNHTYSDILKIFKAESVPVVSIRSRDWSTAVIKNLLTASTTYGLLTRNHADREPQTFENHFPAVISKECYDLTQALIASKKGTRSGGVGKNFNNIFRGCIVCADCGYSVSVKRNSQGRVYMSCEGRNRRGYTVADCKNGGYLQQTLIARVLYILKHERLVDSSTPSEDLPELRLQLSTQQAEYTKFKGRLALIDEDLLPEFQQELRNKKQLLSDLENRIQKATVTTGTAFDLDAELDNLSRIDITTPDGRRNLNKHLSRRFKFSYSTTKGLIGVRALDSEYWCYHDLEGETFAELYEFFTRDAQEDSGDGSEDFTYG

SEQ ID NO: 140 - protein, 537 aa, synthetic construct
MSDELYAKLTSKLQGRFCMYLRKSRADMEAESRGEGETLARHERNLFDLAKRLKINISEVFREIVSGETIAQRPVIQNVLRQVEEGLWDGVLVMEIERLARGDTIDQGIIAQTFKYAGTKIITPVKTYDPDNEFDEEYFEFGLFMSRREYKTINRRQQTGRKDSVLEGKFIGNIAPYGFNRIKLEKEKGWSLEPHPEQAPIIQMIFDMYVNQGVGTGLIAKKLNQLSIPTLKNSQWTVATINGIIRNPVYYGAIAWRRRPEKKTRKNGVVHRYRPRVDESEWLLADGKHDGLITKETWDKAMEILKGNYHPPAPRGVIINPLAGLIRCGMCGRLMVRRPYKNPNTPTGLICQGPTCKNISSPGYIVEERILEGLRVWLENYKAQWNTHKPERISENESTLNIKEQIVKDLEKKLHELHEQNNNLHDLLEKKIYTVETYLERSQTLAQRIGETEESIRAALGEMDLEKRRQTAKVNIIPNVEYVLDTYTKTDDPEQKNNLLKSVLEVAVYTKTIKGHWTRPEAIGQFDLKLFPKLPRV

SEQ ID NO: 141 - protein, 490 aa, synthetic construct
MIMKYAAAYARVSTKEQSILSIEGQFEKIETYARNNKIQVVKKYYDKESGTSESRENFDKLLEDAYSKKFSIILVEKIDRFSRFSKTRAEMIIEELEKEGIFVIAVDQPFDVGSPYGRFMRSILLSQSKLEAEVTQERTTQRMRDIAKHGYWMGGKPPYGYYIDSTKDSEGRKRSVLKIKRDEAKVVREIFKLFNQGWGYKKITEYLNNHLEFAKPRSKKGLWNTSTVHDMLKNEKYVGTYVYGKGYKKRNHVEREDAIKIPGVVPAIIKKEEWELAKSKVALGGQRTRTVKTYILRGYLMCGECGAKMSGTSGKYICSAYANKQHDVYVSVSQNKIEKIVIDYILKQIERFTDQDYQEMAELYKYLRKIKDKSKNEDINKLKEALSKIQNKIKNIVGIISQGELNRSLLQELDEESKRLEVERDNIVSELNYINSKAGITITAEQIKEKYEDMKVKLNSENWLHRQDVISDVIDKVIYYKSGLYEIKMK

SEQ ID NO: 142 - protein, 553 aa, synthetic construct
MKKSAIYVRVSTNHQIDKDSLPLQKNDMINYSKYVLGIDDYEIFEDAGYSGKNTDRPDFQKMFKRIKNGEFTHLLVWKIDRISRNLLDFCSMYDALKKYGCTFISKNEQFDTSTAMGEAMLKIILVFAELERKLTAERVKATMLDRASRGLWNGAPIPLGYKWDDKIKFPVIDEDEKETVMLIYTSYSELQSTSAVRNLLNNLGVQTKRNGTWSTKTISDIIRNPFYKGTYRYNYRETARGKKKKENEWIVLDNNHEAIIYEEFWVQCNEIMDKNSNKNNAKFRGNSNVHIFSGLIECGECHSTMYAKQDKPNLDGYRPSLYACKSRYNGLGCTQKTISDKIVGTFVLSFISNMIRLSDLDRKNLDKEKVEKMLLVGKSFNNVYGIKEIDTILNSLIYAPKNLFTPIKKSTEKNKESYDIKKLDTELKKYEKGLSRLEDLYLFDECDMSQKDYILKKNKINDKISEIKEKIDQTITLNMSSCNYDFLLNATALEFSKEISNGNVDLKALIQRVNRDIIKEFVNTLINKIIVKNKKVQSIEFKNRLVVTFIYNL

SEQ ID NO: 143 - protein, 459 aa, synthetic construct
MKVCIYARKSTGKLSQNNTIENQIKICKRYADKNNFEVVDIKVDVGTGRDDLNRFEIQELVDESIKGKYECVLMKGISRLYRNTLKGLELIEKFDMFGIRVITIEEKFDSNKSRYSHGALDVSKITMYLMFSEMESNKIGERVKLTQIEKAKMGMWNNPTRVPFGYRYNRETKKLEKEPESASTISLIFKMYEGGNSIKEIIESLEKENKKPPRGKAWRDDTIRYILRNHVYKGNIFYRTDSDKEEVENAHEPIIENKRFDAIQLKINSRAKSKGKNNQRSKLMGMVKCSSCGSSMTYRYYHYNGEYYYYCIGYIKNGKSYCSSHKIKADALEQEVRQKTSKYLNKINNIKELKNKKLIIKNKISRLNTEADMLSNLLIENKVTKKHFQQGIYHLTNKIDILMNEKVEIEQKIRRCNFLSNFVNQYDSIIDVLLENRTLLENLIESVSVSNTGVFVTFK

SEQ ID NO: 144 - protein, 559 aa, synthetic construct
MRKVYCYVRFSSKKQQLGDSIERQQKLIEQYLTEHNAEIAEQFSDLGVSAFRGKNVKVGALSRLLERVKSGEISHGDTLIVESLDRISRQKELNTLEILISILNAGVVIYTLSDGRIYNAKTEDQANLVFQINFIISRAYDESLNKQKRSVSAWNRKHEEARKAKTVMTRKLPYWLKVVENHGEARIEIIEDRAREVRKAFELAKYKLGAQAIASRLNKDGAQKRWTLIAVRHLLTSKSVYGSFEAFKTKSLNGTLEKNQAYEEIENYFPAVIEKSEYYNIQSILQSNKEVYATRGRTPKGFRNVFKGLIKCMDCNSYLHQNFLKRKGKEYMYLVCQKSLVHACPAGKKVIIPYRHILEPFLLFFKNYGIEELFSEPSDTQSLNQRLTAIREEKSDKKGALQRMSDDIEKNSGEIPKTILALIGKIEGQLSSLDEEENRTMAQIESLRVSKSVKEEITKSDIDELLETEEGRLKFNSLLSERKIELLVSREFEEEYSNLFIFFKEKGFSENIKFNRKEAIFPFMGVYNFNRKTYSDGFGGEPKPNEKVDYEKFRIDWSL

SEQ ID NO: 145 - protein, 496 aa, synthetic construct
MNKGNISPAPASFSLDNVADLYIRVSTTEQAEEGYSVGEQEARLRSYCSAMGFTVNAVHIDPGYSGATLDRPGINQVIKDVQGGYVKKVIVWKLDRLSRSQKDVLILLEDVFLENGCNFISLMESFDTATPFGRCIVGILAAFAQMERENIKSRMMMGKQAGLKEGNYYSGITPIGYKSELQENGKRSLVVDPFSSRVVKDMYKLYSSGRSLGEIGDYVQKKYGVYADRDRRSAADQCGRVLRNPVYAGRVFMNDLEYSGKHEALVSPEVWQKVNDRLSQNKKAYKRAYSGSDGLLSGLLFCGDCGARMSIRQWGWKTSKVNKYICYSVSRCSKRMIKSDSCSNRKEHFTVSDLDALVLEEIKKLALDPAALDALVEENAGEAPPDLGAFRERLGNVEKQITRLLNLYQTGIVGLEEIQDRLSALKEERKAAQKCLEEAEAEDSGKMSKGEAAAALASLSGIIEAGDGDGLYALVHSLIEKVVVLNGDITIYWAFC

SEQ ID NO: 146 - protein, 604 aa, synthetic construct
MKKGALLLRVSTEQQEFESQKNELIPIAEGLGYKISDDLIFGQFITGKDDYRGRERESITALKEACRSGKVDAIFIWEVSRLSRSSIAGRMFINEFNEMKIPIYFKDRNIWTLDPETLEEDNTTKMIIGLFFDFAEAELKTMRNRMMRGKRRNASDGLATGGYLNYGYEKELETGKIQICEEEAIFVKDLFQKYSTGQYSLGDLVRYANSTPNLPRYKKNSKRGEFTTNTGRLKSISTVHWNKAVIRGMLKNLIYIGKSHFQDITKSVPAIVDKNLFDQVQERLAKNPKTKEKSRKHTHLLQKLMICGFCNNMFYGHYSYKGNHYICSSFNTTHLNCGNSSLGYEKVESIIWDFVKKHTYIFNKIEEKEKEEFKKELMTQKEELIKDRNRTEQEINKQAKAIDNLLDMVANGVFTMQDIQRKKKSIDQDIEKYNNDLAKIESSLTLIEIKLNKIDNQLLTEDDILELEQSRQKMKDIINLAIENIKVYRINRSNVVLQIALVNKVVNILYMYRARKHFRYYYIDDDVATFLPHNEIPEFVKHKIVDVCFEVTSNNNSVFGEEIFGNYSYSQMCEILERYNQYEDYKPFEKMIVYTKKDKSIPSF

SEQ ID NO: 147 - protein, 582 aa, synthetic construct
MTNPASRPKAYSYIRMSSAIQIKGDSFRRQAEASAKYAAEHDLDLIDDYKLADLGVSAFKSDNLTTGALGRFVAECEAGEIEAGSFLLIESLDRLSRDKILDAFSLFARILKTGVKIVTLSDGQVYDGSSDQVGSIYYAISVMIRSNDESKIKSTRGLANWSQKRKLAAEHGVKMSSQCPAWLKLSDDRKSYLIDKERAKIVQRIFEASASGKGANLITKELNRDNVPTFGRGALWAEAFVSKTLRNRAVLGEFQPGQYVNGKRQPAGDPIPNYFPPVIEEELFDIVQASLRGRLLAGGRRGEGQSNIFTHVAFCGYCGSKMRHRSKGSRVKGNPPHRYLTCFNRFNGPGCDCKPLPYAAFERSFLTFVRDVDLRGLLEGAKRKSEAKTIADRITVNQEKVKKADERIRDYLMKIEGAPDLAEIFMERIRELKTEKDDLVRSIEESNDALSKIKSDNVTDEELASLISTFQNPCGENRIRLADRIKSIIERIDVYPNGEIRKDDPAIDLVRASGDPDAEKIIAAMNAGSRLKDDPYFIVTFRNGAVQTVVPNPSNPDDIRVSVYAGEKTRRVEGSAYEYESD

SEQ ID NO: 148 - protein, 479 aa, synthetic construct
MRTALYVRVSTQEQANEGYSVGEQEERLKAYCIAKGWTVYKVYTDGGFSGANIERPALKQMLIDIKNKKVNAVVVYKLDRLSRSQKDTLLLIEDEFLKNGVEFVSMSENFDTSTPFGRAMIGILSVFAQLEREQIRERMQMGLDARAREGFWHGGGYDPIGYDYIDGYLQINEYEAIQVKKVHELFQKGLPIARIQKMMREKYTTKHGSWVNHSTVRNALTQPIYTGKIEWKGELYEGKHEAIIDEDTFNKSVKRYNEISWNKGDGKNKKRPFQAKHVLTGLVYCNHCGARYFAKGNYSGRGENRKYRPYYTCYSRAKSAKNMIIDPNCKNKSYATVDLDRIIFDEINKLAFEPTLIREIESDKPEKENNNAAIETRIKEIDKQVERLLDLYQMGTSSVDDVLSRMDKLNSEKQALTDELEVTEPEVPNLSQDEAEKLLVEASEILESDDLIKKRELVHSLIDSIEIDGEDIIINWAFV

SEQ ID NO: 149 - protein, 501 aa, synthetic construct
MKPNIKEVAIYLRKSRDESDGKEDVLAKHESLLLEYVKNHNLKYEIYKEIGSSEYIDSRPKMVRLLNDVSQKLYDAVLVVDLDRLSRGDLEEMGRIGRIFKDSKTIVLTPTKTYDFNDEEQALINNFEMVFANHEFRMIKKRMLRGKLQGTKAGKWTNGRPPFPYVYNRLTKELDVDSDKVKVYEFMKKMFLEDMKATYEIAWKLNELGFKTNRNSYWYENTVRRLLINEVHLGKVVYGKTSGSGSKKKLNANGVQIKDRSEWIIAEGSHQQLKTEEEHQRILAILESRRYTPKGTRTNVQVLSKLIYCGKCNRVMSFTGKASGKKYVKTCLTTDHFGNRCHNRCLNVEVIYAQLFLDLEQYEQQLLNHEPKEKQGDSSTLQLALHNKLEELERLEKGVNRIKDLFIDEVIDKSEMKKRLEKQKQLMQMKKEEIRSIEQSLAVIGNVRTDDDRLHAIREFKKAWNTEGISKRELNTLAKQLIDRIKYTREGNNVQINIKFL

SEQ ID NO: 150 - protein, 492 aa, synthetic construct
MASIDGAVIYCRVSSDQSGRARSVSEQEADCRRTCEAEGWPVIDVVVDNDIGASRYSQGTRPGFLRLRALLQRGVVLVSWESSRITRKLGEFAELRDFCADLGVQWFVGGRLYDLNEPNDNYMLGIAAQNAELEVALSRKRIMRAKDRTAATGTHNGWMPFGYVRGPDGWTVDPEAAPIVQEAVRRLLAGDSLRSLAKEFAERGVPAPSRGVGRQGSGWAKIGGKGLRSMVLSPTYAGIHVRRRHDKQSGERVEISRTQGDWEPLITEGEHTRLVAMLTDPSRSRTWGSQVTHLLSGIAICEVCGKGVKHSNMKSDLRPRYRCPDSHVKRAADELDRHVESAVVEFFSDHVRAAAAMYGDDQAAREAAELARELRQQLDAEILELTNANISASTRARMAEQMEQSLLPKIEAAEAKARQVGNPVLQKFANGNTKEIWESLSILDKREVVRECLKVTILKVRVRNPRRAFDPDTVEISAKKTIPIDSDWWTKE

SEQ ID NO: 151 - protein, 510 aa, synthetic construct
MSDLIVREYLRVSKDDGKTGKSPDQQHNENLLAFEREGLVPHRGQPYQDVDRSASRYAKAVREGFERLIADLESDGFDADVLAIWESSRGSRRVSEWARLIELCEERGVRIWVTTHGRMYDPSNARDRRSLHEDAVDAEYESDKTSDRIRRNVRAAAKEGKPHGKNVYGYLRVYDQATRKLLRVEPHPDQAPIVQEAARRIMSGGTFYSVAKILNERGIPPRRPPLKDHRANYGWTSAAVKQMLTMPTYAGKRQHNGEIVGDAVWPSLIDYGDWVKLQSIISPPERRRTNFGTAKHLLAGIALCGVCGAPLRVGKQNAGRKRTDKDGKTLPRVTYRTYECPGVPGRPGPDGKMGFHVGMKQKNLDTAVVEALLTRLEHPSFLATIGDRGGSNDAERQDLLAEIARNQKYLDEVREEAAAKLRFDLLLDQETRIEPKIKEAQSRLEALTEMDPLVLRLVSDGAIREAWSDLDLDEQRRGIRAVMAPRINRVGKDWRGRSGVNHDRVDPGWR

SEQ ID NO: 152 - protein, 535 aa, synthetic construct
MSDGKCIVKYLRLSLEDEDMLDESNSITNQRIVIGQYIASKNEFKNTEVLEFKDDGYSGTNFDRPGFQSMMELVRDGKVSTIIVKDLSRFGRNHIEVDTYLEQIFPFMNVRFIAINDNVDSMKYESGMPGIDVGFRNIINEHHSIDTSVKVKRTLIQRQKAGKYMGARAPYGYLKPDEDVTSLVINPETAPVVKMIFQKYLNGMNITQLARYLNEQKIMSPGQYKREVLKTGVKKTTEKYIWYPVTVRLILMTETYTGTTIGGKWKVASVGSNKHLKTKEEDWIVVEGTHEAIVSKEVFDAVQEKLELNSRKRSKTHNNNYPLKGLVKCGGCGQNLQHVTRCNPHFKCPRKFNAANQDCVTDNLYDDEFNEMIFRAIKLFAKISDDAEPVLELQKVELKSKVNGAAKKIRDAKDSISRYKHQKTELYMRYAMEEISEEEFTRKNDKLDKQIEKETLAIAQMETEQSEAAERLFELPPDGRQCLTDLIEGNKQLTREIAVTFIRGIKVYNDKRIEIEWNFADELVKYVEQVQKICS

SEQ ID NO: 153 - protein, 575 aa, synthetic construct
MTKIAYSYTRLSTEKQIKGHGFTRQREAIEKVCCQHGWQLSDQTFNDLGVSAWKGANATTGALSQFIDLAKKGAIRPNSVLIVESVDRLSRQQVDKSLRLMLELLEVGVSIFTLSDSKLYTTNSDSVMLDLMMWLMTAQRAHEESEIKSLRVRAAKKKNKELIRKGIIVTRKCPEWLTVSDDKSCFLVNNERAEIVRKIFTWYSQGFSTKPIALKLNELGIPYWGKSSTWSYRHIRSLLKHRGVIGEIQLLKRIDGRDVADGDPVEDYYPAIIDRGLWATCQQIKSSKTTAKGRVVERGMANLFRGLLKCECGSGLAINSSTVKGRTYRFLRCSQLKTTGCQAKNWHYEKTERILLIALRHSLSSFSEEDHAVSLRECQHYLARISEELKEKERQAENAINYLLDKPSKLLEARLQTLEDDIARLKAIQEQAEHRLEAVHYEKSTALDKVEELQRVLEDIANDDDSRHKANGLLRRLIDTITLGSISNPRSKEFMEVSGNDYHGLIIIKRRDGLELRIEVLKDYGLSISWEGDDFTVIECSPTQQLNSQHVSQRLINLGGQTVDLWDDEGWVASS

SEQ ID NO: 154 - protein, 482 aa, synthetic construct
MTRPKLARATVTPGEPAAIYCRISHTRDEDQTGVDRQERICRDIAERLQLRVEPTHIYVDNNRSAWQRDRKRPGWEAMLKAMGAGEIRHVIVYHPDRLMRQPKDLEELLSIADDKRVLLHGEANRRDLSDPDDRFILRIEVAHACRSSDDTSRRLKDALKDHAREGRPHVGNRPYGYTRDGRAIVEEEAEIVREVYRRYLDGESPHAIAQDLVARDIPTSKGKAWNPENVRHLLSSHFVAGLRFHLGEEVAVGTWPAIIDRGQWDEVQRLREYRAQQHQDTKKRPIRNYLLRGVATCTCGARMGGTNSGRYAYYRCMRADNTDQQKCNRSISAEPLEAFVRDVAIKVLTKLDTAGYEPATTTRPEADVIADEKDREKLRELKELWLNDDDFTTADFQAMRTPIVKRMKERQRKTVKRPVAVLEGIAGPDAEANWERLEKAEDYARMNAIYRFLFAAVFVRPPTRKGRGLDTDRVDIKPNPLD

SEQ ID NO: 155 - protein, 505 aa, synthetic construct
MPRKPKKTETRKGVIYARFSSHAQREESIMDQLRVCSDYAEREGIEIAATYADEARSGTNTAGRPEFLRMVSDAQKSDWDCVIVYKSDRFARNRYDAATYKAKLRKAGVELLSATEGVPDGPEDIILESVLEGMAEYYSANLAQNVLRGMEGNALKCHHNGVRVFGYDCMPDGSYKINEHEAQGVRAVFAMLDSGSTKAAAARHLNKGGWRSKRGGEFGVQSIKQMLGNEKYVGVYSWGEVRVEGGIPAIIERGTWDRAHAKLKMRGTRKVVKNESYLLSGKMFDVDGNLYESCCGTSRNGKRHYYYRVKSTGASMRKENAEERVRRAVARVLDENPELDETIVDIAMQAQSESESMEREAVEAMRKRLPQIDREMDNLIDLAAKTGAGRTIPEKLRALEREREVLALQIQDMESRAPLIEPDMVRYLLFQLRKCSGPDSVVRGFVDRIEVDAEGGMLVIFNLCTPSDLREQQNGEPQRAWFAKLSSGSPYRIRTGDLRLERAAS

SEQ ID NO: 156 - protein, 523 aa, synthetic construct
MKVALYCRLSEEDKDKINPSDVSESIQNQRALLEGYALANNWQIYDVYSDDDWSGLDADRPDWNRLLKDAEAGKFDTIICKSQSRFTRDMEAVEKYIHKKFIEWGIRFIGLVDNADTSNKGNKKQRQIIGLTNEWYCEDVSDNVKAAFDVKRKSGKFIGSFAAFGYIKDPNDNNKLIVDEEAAKIVRQIYDWYLEGFGIQRITHELNKRQIPNPTIYKKRSGSNYKKTVDNNSLWNRTTVKRILQNPLYAGHMAQGKIKKVSYKSKKFVTIPKDEWIVVKNTHEPIVKESVFLEVQRRFKLRQRSTCEGQAHIFATKVKCLDCRSTMEKGTTSKDKGKYSFLRCKLYLKTPKENKMCTSHYIRLDTLEEVVTNKIKEYINNYLDEDNAVNILKIESEANNKVKSLEKEFDKTDMYLEEQTQLLKSLYIDKVKGIISEEMFVSLNSEFNKRKEFCEQKKKNIEKQIEEISNKANDIGEWTKTVKKYRDFDKLTHTMVNELIDFIEIGEKNKITGEQVVKIHWLF

SEQ ID NO: 157 - protein, 466 aa, synthetic construct
MKRAALYIRVSTEEQARHGFSLEEQRHTLEEYATKHGYTVVDTYADEGVTARKGLKNRRELQRLLADVRAGLINCILFIKLDRWFRNIRDYYAVQDILDKYHVDWIATQEDYNTTTSNGRLMLNLKLSIAQNESDQIGERIRFIYAGKLRRHEVVAGHLPIGYKIENHKYVIDEPQAAIVRDVFRQYLFYQSISEVQRHINNTYNERLNRNRIAGILKNERYIGVWWGIENYAPAIIDHMTFDNTQKILAIGRRGATPRVAVVPYLFSGLLFCPSCDNRLYGFKAGGIKGNSVKYYSCRKHFNAAYLCNFKYSIPEPTVEAYLVDNIEPRVEKYRQELEVIQASNNKKQDIDKRIAAARARLNRLKDLYVSGFIDRDTYEKDYQTYNNELLRAQKEKRTLDGQRLSPQLTNILAKGFSTLYNELSLEGKKTFWKSIIHKLKITHCKPIYPNRKKSPVTLELQIIFL

SEQ ID NO: 158 - protein, 459 aa, synthetic construct
MMTSMEAVIYARVSQDHGTRSVQEQERECREFCDRQGWNVTRVLTDNDIGASRYSGKDRPAYRELKEILRPGDVLVTWEASRAQRDLAAYVELRNLCADRGVKWAYNGRVFDLSDGDDRFGTGLDALLAEKEAEQIRARVLRGKRSAAAEGRPSGKTPPGYRPVRDPRTGRTVTWEPDEVAPVMQEAARRILEGETLREVTRWANEQGVTGTHRQMRDRLHLASYAGLRVHQGKVVGEANWPALWSPEQRDQIIAAFADPARRASGGGGVPVRHLLAGIARCGVCGAGMRHYWPPSAQKISAPPAYVCSDGLHVRRQAKPLEKAVVRATLARIRTIDRAQLADDGGAAAAAARREAQELQDRLDEFTVAAAEPGGPSPRALAAIEQKLQPQIDAALARARASYRSPLIGRLAENPEDWTVLTVVERREVIRSMVTVRVMPTQSRGVAGFRREDVEIHPA

SEQ ID NO: 159 - protein, 532 aa, synthetic construct
MRNHLNISDLNDFVITGYGRNSLAQQSKGDTQRRQSDLIDDFCTLYNLPLSAFIHDNGKSGYTGANITGNAEFARYLRTAQNRDDLETPIVLIIENLDRLCRLDPHRASGLFNDMMEVNIVIVDLVDEHIYFKGQPMEAINKANNVFDRAHKESLLKSRRVAAKRANRRTMASPNKWKNCPFWLTLDAANDVYNPIPEHVALIRKIFLMAAGGAGSMVIAKKLNAQGHTTIKGKAWTTGNIVKLLRNRSLIGEYHHTLRTVVNGKRKDVPADKVSFDYYPEVLDKALFDRVQSLMDAKSRNRVITRKKDRYVNLTRGICFCPACGLDLVLKTQPDAVYLQCPNHATGLCTANARPFNLSVFEGWLRDVWASAEYVVSVAADVPEAAQLAEAEAELHALTNEVTDLTALWIELGREPAIRAELVERTRAKQQTEAKVRELKAELANYDSQTASTQYRRDLLSLALKRGDDLEVLAARDELVSLLNQLKGMHLHKSPDSVFTIEVITPMGESVVSTSIPRPYDKRSKRVGSPWV

SEQ ID NO: 160 - protein, 597 aa, synthetic construct
MKRKLYSYQRWSSAVQSDGTTKARQTFAAEEYAKRNDLEVVEIVDAGISGFKSDNSKSGALSKFLAAVDEGLIPNNAYLFVESLDRITRDEIDVALELFMGILRRGITIVTGMDNKVYTRAGIKGNPIDLLTSILLFTRAHEESKTKQNRTNGNALAMIRRFQSGLPTTIKAVGSHPWWIDCSTDKFEAVRRHPTLWQPAQDAINMFMEGVSVFKVVQYLNEKYPHAYKSKAWKTANIRKLRFNKAVYGVREITVDGTDYALPNYFPSLITEGQFLRLEKIRETTKYIGKVGEGKTITDEEGNSKVIAERNNINLLAGMKLFRCGHCGGTMMAMRHGDTIRYLCEKGRGHQNDCKTWSLPGILVEHTLMLVTTIAYINMQRKGGVDKEDYTAQISSTEKLIEDISKKISNGTSLVLGGLGDVEEVIAQLQELKDSRSNLVLELEVLQRKQLLAEDHTFEGLMMDFFTYAQYGVLQDPIHEYRSKLRDIVYSSIGDVRAWKVDRRLMISFQIKGDDEYYTFSAGDEQYNYIFYYGSPVQLKEGLSPQGNYELPEEIKQRIREHRGVYEATMALMNTAHELLATVNYPQLDGRLFWPRK

SEQ ID NO: 161 - protein, 446 aa, synthetic construct
MREAYSYIRLSHTNQLSGHGRQRQLESTVRAAKEKGWQLMDETFEDLGVSGFKGINVETGAFSKFLTAVQQGAIREGSVLIVENVDRLSRAGVNRAVTLMLQLLEYGITIHTLSDNKTYEPSSENPLMDLMQWALTAQRGYEESLIKSKRIQAVKDAVREKARKEGTYYTTKSPSWIIISPDKKEATFHPTNAAIVKVVIDLYLNGYGTTRIANRMIELGHPTLSVKSKCWNASLVRSLLTQPALSGDIMFKRNGKRDPDILEDYYPALIDKDTHRKIKERLAKGGACKGRRSTTMRNPLAGLLRCKCGSGLGLSHNNARKYSNPRTALRCKKYYGECNGSGISAPRAITGILYGLRRLPMATLLTEEKKVDRVSVEVEIRSLTDSLEGIKQIMDNVITTIAAVGGNKALQEKLIELTAEQDAIEKKRDALRKQLEAITPYRSQRT

SEQ ID NO: 162 - protein, 476 aa, synthetic construct
MADPAPTRVAIYARQSEDVSEGIERQLSRCRALIDARGYALVREYLDNDTSAAKRRGPSTAWAKMLDELAAGAADVVVAVDLDRLLRDTRDLIAIMDTGARVLTVDGEIDLTTADGEFRATMLAGIARFEIRRKSERQLRANLDRASRGRPTPGRRRFGYDSDGITPREHEAVHVRRMFQHVADGGSIRSLVRSLVDDGVDPAPGRAWTPTRVRYILTNPHYSGSVTHLGRVMPSDSIVPLVDADLAAEVRAILADAARRTTPGPSRRYLLSGLATCGVCGAGMHFMRTYRCSASTAHPSITRDRLEGRIREEIARALIGGGSTLFPVRTETGAVGRLMAEHARNADAVTALLADRDEGLVPAQSARERLIALRGEREEIERQLDEARVSKSAASALVDVAQTLLSSLPPEGTPYDDVAAAILARFDELDLDRQREIVAALLYVQVDPGRDTRRRVHVEHLLAPALNPREQVDADE

SEQ ID NO: 163 - protein, 516 aa, synthetic construct
MPTAFSYARFSSSTQKKGSSLERQKTMVARWLVAHPDYSLSDQTFQDLGKSGWKGEHIKEGGGFAELLAAVQAGLIQKGDAVLVEAIDRTGRLPVLDMLSNIVSPILRAGVSIVTLEDSLVFTEASLNEGGHIYILVGKIQAARQYSDNLSRRLTASYDSRRRLAKEGTPPKRNTPVWLTSKGEVIQEIADQIKLAFELYTSGLGKAVIAKRMRESGVPALAKTSGPGVEGWLRNEAAIGRWNGAEVYKPIVDLSRYQLAQIEGERRKTAPTAKTATHFYVGLVKCGSCGGNFIMRTIKGVQVSMRCRKRQELKGCDNKKVIPKVVIDAVYRYTATPAARKVVAHEHRGVNEKAIIAAEARVLELSKGIEEMAQAFRGGRKIPEVVDQIRAMDGEREAVERELVLLKAKVERSPTNWRVQGRVDDLGRTDPQRLAAMLRSVGYTITIHTDGRLCTSESETVYRYAGVDRREDMYRLAVVGGKELLVSKIAEEVFDEWWEPGDGDEVIESTYTDGSE

SEQ ID NO: 164 - protein, 502 aa, synthetic construct
MTAATPLRAVLYVRLSKESARSTSITGQTDDLSVIAERAGWDVVATFTDNGKSGGKERENAQAAYDLWARGDADILAVYAYDRWSRMGIKTLAALIDVVDARAKTPHPATFIAAREGIESTQADWQLRAAFAADMAKRERDLVSSRQTAARGRMRQQGRNAGHGVPPFGYRTGPHPTLPVGRGLHVIPEEADVVRELAERLIAGESTVKLADELNARGVAKARSAARVARLAGMPDEGLDRGAWNGSRVRATMTSDHLLGRVSHNGAPVYGDDGQPLAPFEAILSLETMLALRDRFDANRRGEVKRRASGLLSKLAYCSGCDRPLYPRRTSVTERNPEGHVNYGCSAASSGVTCPRKTYISARKLDGEVVARYLAARGDAPETRYERRVDDQGAGAELADVEARLKELAGRLAAADDEEEADGLTAAMLSLKARRRSLRSVTPTVVEDVVYTGRTYREAWDAARDDDERRRMLLRVMDHIVVNPVGSPERVTIRWNDFPGAV

SEQ ID NO: 165 - protein, 488 aa, synthetic construct
MPLVRMEDMATEKMKNVWIYVRLSYDKKKGTAQEGATVKRQEDECKAWARDHGLTVLGVIRDNDVSATSSKPRKGFEELLKKRPAAILVWHQDRLVRKTKDLERIIELGIPVYSVTGGTLDLSTAQHIAIARTMTTWAAYEGEHRDERQRAALDEIHANREPVPGKARFGYLGADEKVGRRVNCKVDPETAPVVKAMFESIAHKDPARRRSINSWARELGWPRRRVCDTLSNPAYAGTLTRRDVQFEAAEHVDRIVTQELFDQVQDVLATHLHAGRPGGVVRHLASGIARCGVCGGPMQFRNNYLCLRDLSHPTVKGEYVDKKVTAEIVNVLLASEQDTAETVQVGALEARLRKINEEEAGWAQAQAAGMNWTLIAPHVKALLSERQRLQEERKNLMAASVRQRLLAELREAVIDPVTRRASMAAAGELRNEVRRRFEGLPIEERRELVTEHLDIVVHPGRGPGRVQITHKIFVELNDGVTVEEELFS

SEQ ID NO: 166 - protein, 480 aa, synthetic construct
MKKNVVLLRVSTDMQDFESQKNGIDRYIKENNITVHKTIEEQGVSGYKTKLENREGLQELIQMALNGELDTIVVFSSDRIGRRLEMLSFMSIMKEQNVRIVSVTEGVINEDNDTSDLIQAVKFWTANYESKKTSMRVKSGLRATIEKNAYTGGVPNFGYKVVDKKLVINEEESHIVKLIFESYIDFGYKKTLELLEEKNILKRGKKWTKVKVFSILKNNIYRGKKQYQGELLDFPHLRIISDELFKKAEERAESRNNRGINRYTNRTNIPFEGLLYHKCEDGIERKLNIDYVNTKHGRVHTYRCKHCKDVKAEITKNFNSTKIEPILIDNIKSIMNKISIEELEKRYNEKITNSSSIIITNINAITKTIEKKKKAIDSAMNEVEKIFMGDSNIDISIPSNMIKKLEIEIEELKNQLEGYNKELQDLKNTTSNAMYLLDKYKDFEYSFDNAIDEERKVMLQDLVNKIVISQDEVNIQLNIY

SEQ ID NO: 167 - protein, 494 aa, synthetic construct
MAGVSRTRPSKAVIYCRVSGAKQVREGDGLASQENRCREYATYKDYDVVEVFKDDMSGKFERRPAMDRMLAFLRLHPKGSVVVIIDDISRFARNVQAHIALRETLSDAGGILESPSIEFGEDSDSRLVEHMLASVAQHQREKNAEQTSNRMKGRMMNGYSVFAAPVGYVYKKTKAHGRLLTRNEPVASIVKEALEGYASGRFSGQADIKRFLESQPEFPKDLPNGLIRQQKVTNILNRVIYAGYIEHEPWGITRRKGHHEALISLETYQIIQERRNGKGIAAKRPDINEDFPLRGSVVCACCDKPMTAYFARSATGKRYPYYNCQTRDCSEYRKGIRAEKIDTGFEAILRAMAPTEKMLSMATSMLHDALGQSKEQVAQAKSALKRQIKELDKQQDSLVERLVETSNPKVIAALETKVAKLENDKLLLNDKLAQETQSVFPLGEIIELLRDFLSNPWNIYEKGFALGAQNHPESSLQSTISVRPKKRLSNSASV

SEQ ID NO: 168 - protein, 583 aa, synthetic construct
MVLTMRKCFLYSRVSSDAQISGDGLVRQEDKLKQYLLQNAERLNLSTIDYEILVDSGISGWKGSNMGDTAALGQLFMRVESDEIDDSVLIVESLDRFSRENPFRVAGYISKLAEHGIDIIDVENNLVIGPSNPWSSTISSIIANRAHEESTLKSKRIKAAWDSRRKKAKESGQYMIKNTPFWIDVLDDKYVVNANASIVREIFDLYLQGYGSFTIAKKMNEVGKIIRDKRWSTPKICALLRNPRCNGDFISNSLERNYEKGTSTSTEHVIKGLYPKIVTDDEFALVLNRLDGNHKNRRVRNDRKVTILNGLLKCSICGGALTVRSAGAYRYVGCLKTIEKGGCYAKPMRYDVLEKIIIEHIRNMDIGQVYESNDSKEFQLQSRIKNLASHIDEFTNGIASIRAKNKKPSFEMLSELQQSEEELESLKKEQEQYKLSKIDLGEFKVSTELLDVTQVALRSRLESTISNLLNKIKIHHTKDMSFSLIELVYVNDVVKHILVADKKGLVSGDVIIRQDDDLTIYESRSVKIIKDEGRIFSLDCSISEIALNDYLFLMNIVDFIDSDAKEFLNLHLNAVLQHESQQK

SEQ ID NO: 169 - protein, 542 aa, synthetic construct
MAVLTTVEGVLDQAVTRMAREYLRVSKGRGRAARSITDQHRDNLASAEDHGPWAWGEPYKDTGSASKFARKQRDDFEKLLGDLRTGAFGKPGDVLVLWEISRLARETGRGVELVDACEAGGYLIHITSHEHTYNPANYQDRHSLISGINDAEKEARLLSVRTLRGLNSAAREGRPQGQVPFGYRRDYEVVDGRPRPVSQYPDPVEGRLVEELFTRVAGDGEALPEPIYAIAKDWASRGVVSRDRVVDGETVPGRPFTPQSLRSMLLRPGYAGLRKHKGTLVPEQWEGWTPVVDRALFERVQAILADPARRTYTGEHIRHVLSMTLKCDVCGGYMAVMARRRNGRKATLGYQCHPKGHVWVRKDEVDRIIIGDLDPVDPESGELLPPEPGVILQYLANPDRHAALRHRPDLDAEEAALRAELAELSSELKELEEAPQPKTARARIRRTADIEELETDVEVLQAKLGRLTTPAPLAELLPDEPITDVVRWWKKAGVEKQRAVATLLLTPAMLGEVRITPSPVPRGYAPAAERMVWSRDALPLAE

SEQ ID NO: 170 - protein, 508 aa, synthetic construct
MYGMYLRKSRADDPNETMDETLAKHEKLLFDLAESMHIDRSEIIVLKEVVSGESIANRPEIQRGLKLIMDGVIDQGMFAVDSQRLARGDTLDQGTILRVFSLTKVKIITPLKIINPADEFDEDYFEFDLFMGRREYKMINRRMQRGRHISVQEGYYVGSIAPYGYNRCRYNKSYSLEINQEEYHIFALMKDMAIEGMGTTNIANKLNEMGFKPRKGDRWTTATVRGILINKTNLGLIKWNSRKEVKKFDNNEIVKTRPINKEAEYYPGLHPAIITQEEYDTIIEQMKARNNAPIKKNMKIRNPLAGLIVCADCGRNMVRRPYKKNQDSLICPTSNCKNVASYVSVVEERIIESLKAILNQYKTFVDDYDHSNKDKYVSSKKTRIETLDKEIEKLHGQINKACEMLELGAYSVALFRERKKTLDDKIRSLEKEKATIEKESEDEKVEQYRKAIPKIEKAVSLYFDASIEERNKLLKSVIEKCYYKKEVPGSRWKNDAMKEFKLEIHMKV

SEQ ID NO: 171 - protein, 487 aa, synthetic construct
MRGFQYIRVSDEEQAVEGYSITAQKALLDRKFAEWGATVAGVYIDDGYSAKDIRRPDLQRLMNDIATLKPDFIAFWKLDRWTRAGRDWHALNDKLKPYGVTLRSAIGENLSEGTAFERFNVGLNVLLGQFEREQISERVHFVMMERHNKGLRNGAKPPYGYDLKNGQLIVNEEQAEVVRKIFNWYAYGDENGPCGFREIAVKLNRGNGREWTYSSVRYALMNPVYCGKLRWNYRKASGKPTGKEIIVDSDHAPIIPVELFEKVYGEIVSRKRGGKAATSEYAFSGVLRCGRCGKAMVGFSRGARFYRCTGRANAGTCDMPAIHSGRLEQAFLASLDYDSDQVRNLIDVPDRSDEVKSRREALEAEIEQIRKRKKKWQMAYADDVISLEDLRERTREDAEREKEISQELATLPQGTSNVWSKEMIADILVDAKEAMQSADEAEKKAFIRELFERVTVDAEKPEGKPAPGRYSMPVIIELVPRQSKSYL

SEQ ID NO: 172 - protein, 591 aa, synthetic construct
MTKLYSYIRWSSAKQSLGSSQARQTKKAQEFAILKGLEYTEIFDRGVSAFRGKNIRSTAALGHFIKEVESKSIPADSWLYVENLDRLSRDDVTNANELFLRLLNLGLTIVTGMDNKVYTRESVNLNPADLMFSIMMFMRANEESRTKSARVIGHVNKLLESHKQGLPVNIKSAGNCPWWIDDSGLQNESPKPHPIYFDIAREVIRLFLDGHGSYRIAKMLNRDREKYPAPSGWSKKISRTWSVRKLEYMRRSKALTGEYVITVRGVKHTLAKYYPAVCTETEFARLQDSVRNNRITQSEDRERIALLSGMNMLRCANCGGAMSFYLMEGKIRYCCGQARNQAEDGCSFWSVAGAPIEHAAFYALMYAAFDYEMGNSRVVDTEALNHDQDARRLRLQKIDRDLAYFTEAISLGTGPLITLVEKIQELEQQKSCLLLDIDNGNNQLLLAEQDDVGSRITDIIELLRSEVLTDITHPIRLKVREIVRRTIQHIAVAKREDKSIIAIFCLPNGEYFIANGIKHEVNGSIAKDVGVFKGALDENGAPLELKARTKADAKVIIKLLDAEKSLRRKIDAIAEQLKIPPLNGKDFFAQR

SEQ ID NO: 173 - protein, 567 aa, synthetic construct
MQKAIIYIRFSTLEQREGVSLDRQKERCLEMCEANGWDVETILVDEGKSAFAGKHRDAGAAFGDFEAAARHGIHAGKVLVVERLSRLSRLDYNETYDLMRVLNKNGVTVGCWDGGRIYKANEPIEFVSVIELLVKAKTANEESQTKSDFGKDKWARRRADAASGKVATSNGPAWLQLDANRKWVVIEDRAQVVRQIFEWADQGDGSLRISRRLNEAKVQPWARYANRTPRCWERKQVSRIMANLAVIGDYQMMMEDSDGKPVPAGEPIRGYFPRIIEPDVFERVNLGADDRKIMKGGGRSVAVANLASALTRCGVCGGAMEYVRSRLKGATVIRDGKETAPLKQDQGYLYCRVANRRGDCVNRTSIAYVGFERALLDSALHLALDDASFSRVDEVGRLTVMIADKRRDYAAAFSRAETLFNAFAESASDMGMKMALEAERTAKAVQAEIDELQVQKDRASGQASAAEHLSRLNEIREQLYDDDLDVRRVARLKVAAGLNSVIEKIECQEDRRVFVRYKRGARVSIIYPGRGRRPAYSFDVNLAKPGDDHSDDPKVQALIGRMKLEAE

SEQ ID NO: 174 - protein, 570 aa, synthetic construct
MPGSGSETPIRVAIYVRVSTVYQIDKDSLPMMKQDLTSYCKYILNTDDFVIFEDAGYSGKNTDRPAYQKMMSQIRQGLFTHLLVWKIDRISRNLLDFANMYAELKDLGVTFVSKNEQFDTSTAIGEAMLKIILVFAELERNMTSERVTATMINRASNGVWNGGRIPYGYSYDKPTQVFSIDPEENKIYNFMVETYEDTQSIVHTSRRLNEAGYRSRNGNMWSPVAVWTILRNPWYKGVYRYNYYKIPGRKAIKDESEWVIVENHHPASIDSDRFDRIQATLDKNARYRNTPGRKTAQKNVHVFSGLVWCAECGSAFTASPGKLHVSGYRPSKYGCPNVRKTKTCHAKYTSDVVLGEFLLNYILNILNAQKQFAYIHSTDDLQKRLLHGSTFSNVDHVDPDGLASLLNMLEKCSGSDPVLLKRPRSKPKMDPELKRMMADQKKQQRALDRLNDLYLYSDDSISEREYLVRKQQITDRLQEINEAIGMMSQEPWMRTMNDEEFIRQASSFILTQKLADKQYIYYENLAESLDPEILKNFFVSILDSIILRDGRPETVVFRNGLSHTFTYKDS

SEQ ID NO: 175 - protein, 461 aa, synthetic construct
MDAVIYARISRDAEGTSLGVNRQLEDCRQAASARGWTVVHEYVENDTSATRAKVRPQYQQMLRDLANGIAGALIVWDVDRLTRTPRELEDVIDLADAHSIALVSIGGEIDLATPQGRMTARIKGSVARHETDQMARRIRRKQRERAEQGLPNGLCPFGWRRVYDDQGRRAGSRDVAYAPEAEQIRDGVSRLLAGESVRSIAMRWNTEGLPTQRGNGWRTGTVRQTLRRAANAGLREHKGEIFPSDVIEPLITEDELHRVRALLADPGRRVQHGTTPAYLLTGIAECGRCGGKMRYLKPRGRHNIPSYGCRDCTRVARSMGLVDAVVEGAILGRLQRPDVLETLPTMDPKRGDDLRSQAEALEAKLSEAADLFTAGTITGEQLSRITAGVRPQLERTRAQLADLTPASAAAAIAGDDAVARWEDATLLVKREIVDTLMTVTILPAGPGRGRDPESVKIEWKA

SEQ ID NO: 176 - protein, 591 aa, synthetic construct
MPTVKRARLKAAEAAPSRPPRAYTYARYSSPQQGGGSSIARQDAYAERWAKENGLTLDRSLRMADLGKSAFSGEHLKPGSALAAFMLQIKNKDVLPGDALIVENLDRLSRAEPIDSQGLFGDIVRAGVAIVTSNDNQVYSRETLRQNRALLLVVDALWMRAHEESDSKSVRIRAAYRDKVKKWNDGERDILFGAPRHMKDNGKGELVLVPGTDPSWVLYNREAKRFELDQPQADAMVRMIELYRAGYGAVEITRRLAAEGLSVSEKYPTNRIQRVISYPALKGDKVVISDGKEFVLRGYYPPLMNESEWDELQLLVGKRGHRKGKGDVPAILTGLKTSYCGYCRMLLVGQTVTKKLADGTERKSRRLRCGTYYHLAQKCEGGDSWRAEPVERALLTVCADQANLDYLFSGNDKADPLMKQLTAKRAALAKLELRIKGIKDALRNSDESPETFLETSRELEAEKRDLTKVVEQLERELKVHTCAKPSTGDAWAALTEEAMALDYDARMKARLLVSETFERIDVFAKGLEPKAKHGLEVGARTMHLRLTSKRGVVLGFDFDRRTGELLNTPAKVPNRERIATGKHSTRSARTK

SEQ ID NO: 177 - protein, 533 aa, synthetic construct
MSYSNMNPQSQPPAKCYSYVRFSTVSQGKEGKDSYIRQTLAAKEYAQRMGLEYQDKSFSDLGISGFRTSKKRDGLSSMLEAIQSGAIEPNSTICIDGFDRLSRASFEHTYDTVRSIVGTGVKLHVVQDNLTLDKSSLNDLISIVKVALQSDLAHKESAKKSYLIKQSRLRAREAHKVTGKLPMWIKRVLNSKGEPTDQFVFNDFETCIRELVSLRVEGKSLQSIAKVLNTKGYKTSKGSPWSGAGVRSIIENRALYGAKSYHDTDSETGRMNLTPVDIVPNIFPALTTFDVWQSIQQKSRSASTETNKVSKRGAYSGLLRCACCGAAMIMRTSTYNKQVRMYRKCIRAAEGSCTQTEIVREPEKYIDIALKQLTYIVSEKRHVSKVPEIQEQIATLEKTEAILIQRGMAEKLADLYVKIDDLKTKLVDAQKEDSRHTTPTETSFAKVVGIEDLEHRNMVLRKLLNGVYFTLLWKYKTQSKWKVTIEQINGVKTTFILSQKHGFGNTEVEMLADPLRWTNLVQSDLEPWELEQD

SEQ ID NO: 178 - protein, 509 aa, synthetic construct
MKKAIAYMRFSSANQDKGDSLRRQKKLIDDWLKNNPQYTLDPTTYEDLGLSAYKGKHAREGAFSEFIDALENGVIIPGTVLLVESLDRLSREKIGEATERLKYILKCGIDVITLSDNTQYSEASLDDPYALIKAILIAQRANEESEIKSSRVKLSWKKKRDEAELNGRIMTKACPRWLRVSPDYSHFEVIESKVKVIKKIFSLRKENKSLTAITKYLNDRLIENMTGTPGEWSPSVIEKILGNKALIGICRPTYRGRAKGVNEIIDYYPKVLTDDEFYAVQEVRLSPFGYNSHSGNPYLINLLRTVMKCKCCGNTMIITAVSKSGKGYYVCPMRRLHRCKSPSIKRELVDVNLIEEILFNFDKLQIESNQVSLQETLEKNSIDLQLQINSLVQALTIAPEVNVLAGKVRELDRKLKKIETTIKVLKNKAKKDKSRGSKELNLSLKEDREVCRRLAFKSFREVYIDTETKQCDIYFTNGLVFKNFPLSKRCRADSIISTLKYMDENTVYF

SEQ ID NO: 179 - protein, 534 aa, synthetic construct
MKAAIYSRKSKFTGKGESIENQIEMCKKYASDNEYDEIFIYEDEGFSGGNINRPEFKQMMKDAKSHKFDVIICYRLDRISRNVSDFSTLIDKLKLLNIGFISIKEQFDTTSPMGTAMMFISSVFAQLERETIAERIKDNMYELAKTGRWLGGTPPFGFISEQCLYSEANGKQKKMFQLTPVESECELIKYMYEKYLSLGSLGKLQKHLLSKEIKTRNNATWDIKALQLILRNPVYVKSDEVVLSYLESKGAKVFGEVNGNGILSYNKKDSKDKYKDISEWILSVAKHNGLIDSSLWLLVQKKLDKNKSLAPRLVSNDSSGLLSRVLYCKKCGGKMIQKKGHASVKTKEPFRYYVCLNKMNFKSCDSKNIRADILEKHVADKIIDETSDAGSLIKAIDDYKNKLQLDSSKSTNLNSIKKQIALKQTQINNLMENISKNPKLFDLFNSKIEELNSELKSLKFKKFEAESVKENNSNALKEIDASTQMLLNFKKLWIYADFSTKKLLIENIVDSVYYNANDKTADVKLICFKKKGAL

SEQ ID NO: 180 - protein, 514 aa, synthetic construct
MNAYSYRRFSSATQSHGDSIRRQIQLAEDYCHKHNLELSTDSFEDLGVSAYHSNNSLEDAGLGQFIAALEEGKIPTPCYLLVESLDRLSRANIDEALQQLLAITNQGVIVVTLFDNQTYKKGMGLAEFITAIVTMARANEESETKSKRLKAVWHKRRTDPNALKTNNKPFWLDLSDDKKSFILNESAELVREIYELSIGGMGSHLISKHLNAKGIPSPKGKTWGDAVITKVLNTKAVLGEYQPNQRVNRKSVPIGEPIQDFYPSVIEEQTFYLSQAQIKQRAKSLKRGSTSSHLNILKDVGTCKRCSAPLRLQKQSHLYYFRCPESLKGTCDSKPINIMFLRDWLKEQWLTPAFYKTWSKPKTAVRKLKPLEAKRQHLSDALDTMLEAFASTSNSQVIANIQKRTDELKELDSLIELEKQEQAKETNTIKMNMKESIGLIDTAFKPEITTETITARNKLRQLMNQFSRFEVDMIDKQAIFEIDSTSSFIFQSIQNPYHYMKAKPMFVWKMLSIR

SEQ ID NO: 181 - protein, 531 aa, synthetic construct
MTKPLAIPYLRFSSGKQAQGNSYERQHQMIAAWLQLHPDFLLATMRFEDLGISGWNGEHLDYGFGKLIAAIREGYIPAGSVVLVEAIDRIGRLQPIEMIRHLSNILSNGVNIITLDDGIEYTKDSVNGQHLFLLAAKVQQANLFSENLSRRATASWDAKRKQADRGEPVKRRLPIWINPDNTLNQDIAPIVVEIFELYASGFGTRRIQHRIKQRCQEKGISIKISNAGIQHWVSMKLAIGYWNDSPNVHPAVISEELWWRVQKERERRSKGKKLSAPTKHPLAGLVVCGVCGCTYRVKAETGKSKVMHCSRRDELDNRNCSNKKAIPVAVLETVRMMTGLEYIEKAILSTQPSVNTTRLAEIDQKLSALHSQLKSLADTIVSVGALPEIVAKASELKNERESLELEQTILLQQTDTTDIRSIVKAEATLLLDDPLRLNALLQKVGYKISVFPDARITVDDQSFRYAGYERKTDRFKLIDLMVEVGQLIYINKNEREKEARLKAVASTTKDPSPLLVLMKRKNAYISKAENL

SEQ ID NO: 182 - protein, 497 aa, synthetic construct; identical to SEQ ID NO: 34

SEQ ID NO: 183 - protein, 555 aa, synthetic construct
MCVAIGYMRYSSKLQGGGSTIHRQKSLINKWVEDQKTHHGKVYEVKFYTDKGLSGWTGENLLAGALGRLIEEVETGGYPEGTPIILESIDRLSRQGHEEATAILRRLTSTGCVVHSILDRQVIHRSDLKTFIGAMQIIAVAERGREESDIKSERVSSSKKRNYELAKLGKKLVTKNLPGWIYLDQKGKMQIDPVKQKLVQEIFEMRLAGHTYQGIAEAMTNRGEPVLNERKGAQRWLPNSIRTLLHSRSVIGVLPASKVNEEYKEIEDYFPSAITKDLFYAVNDLNVPAVRSREKKQYPETVFLFKGLVKCRYCKGNVFMNGAKPGYWGRIRCIGHHDKVCDAPSLPRYDFEQSLITRIFPLLKSMDVRTEKNPVAVLQAKIDHLTNILEGYYDDLEEIPREDKPRRKTINERISKRANEKEEYERQLVVVRRKMEVRIANTLSDLNYDDYSDRLKMQLVISRNIERIVLDSLFDKVHIKLVNGNALMNFPLYGDVDGSRLVITAKENTGITDVERILGLDDAMPTVYNLAPSSGEFMDDREFPEVEPDYPNEEQ

SEQ ID NO: 184 - protein, 533 aa, synthetic construct
MKQQLRAIVGSRVSHLDDDKATTRKVSHKAQTEEGERWATSQGYTVVGKFEDLGVSAGKTTPFERPDLGKWLTPEREHEWDVLVFSKIDRAFRSTNDCVEFARWTKENRKILAFSGDGVVLDYLHPKNESLDQMMSEFFIYVGSFFAAIELNRFRTRATDRLSYLRMTDRVSHGVPPLGFRTVPHPSGQGKALERDPEGYALLHEIKDKLLHENYSITALVKWLHDPRCLANKTIDALTQRSKPTHVTNCSCRQTNAASARGGDKWWSATTVRRVLTSERTQGIRMSEGKPVLDSHGTPIRMAEPTFTDDEWEQIQQVLNQRSTSGRARHMTDNPFAGIVYCVCGYAVAQHRRKSSSGKEHTYVRCGQGCRGAWKLADVHEQLDISFLAGYGDQEMTKLVFVPGEDRSDELVGIERSIARLRWESDNDLVDDEDLYQSRMASLLSRKREIGQIVVPARWERQGTGKTYQELWADPETDRRQVMRDARIRLVLHFIPKGSDASFVTHAHFVDMWNPSAEAKALSGNDIGGMSSD

SEQ ID NO: 185 - protein, 478 aa, synthetic construct
MVELVSLRKTNEVAAYVRASMDRKGDRWTVETQLRKIRALAEAKDWEVVEVYDDNAVSATKKRRAGTRWAEMLDDARAGRFSMVVAVDMDRLLRSTKDLNTLIDLGLRVVTVDGEIDLSTADGEFRATMLAALARFEARRKAERQIRSNERRRAEGIPASSWKAFGWTREGELIEAEADAVRRAFDAFLGEPSLSIRRIREDLNSAGHLTARGSAFSVDAVRYLLANPLYAGYIKHYASGELYPVQGDAFPPIVGEQTWRAAVAKLEDNVRRSARQGNQPKYLLSTIGLCGKCGATLVSGTNSRKQPTYRCGEQFHLTRQREPVDAMVTEAVLTRLSSVDVHDLVMPQEDDGPDREALLTERNALVERVKELSPLLLDVRQPVLEITEAIRGGKARIDQIDAEILDRSVSVAAKLLGDVDESLGTMERREVVESKWKALDMDRRRMLVDELVTVTIEPIAPGHVKFDPDLIRIEPRRD

SEQ ID NO: 186 - protein, 528 aa, synthetic construct
MAYCIYLRKSRADRELELQGFGETLKRHRDTLIELAKKKNLPIGEIYEEVVSGDSIAARPQMQRLLNDVSDGKWEGVLVMEIERLARGDTSDQGIVTKTFTYSNTLIITPMKTFNPTDEFDQEYFEFGLYMSRREYKTIKRRLHAGMEASCKEGNYIHHTPPFGYSIVKNKKSKGYRLEPKPGEAEIVKLIFQWYTKGILKEDGSYELLGTARIADKLNSEYSINPLGGVWTIPTISTMLRNEHYLGYIVFGKKKRKKVVENGIIVDKWTRNESYGLYKGKHPALVSQDTFNLAQERLSRNPRRPSKTITNPLAGVIKCGMCGRSMYRRPYQKRGQSASLICSEKTCHNVSSAFYLVEDALLTAIKEWIDGYEIKEEANKYDTSVLESKTKLLEEQQKQLITYKNQLTKVFEAYENGIYDSDTFLNRQKTVSESISSTEEAIVKLNKEIANEREIISHQEEIIPKARKILEIYKTSDDVQLKNDLMKSILDKVVYTKTANGHFKDQRQDDFKLELFPKLPKNKGNSSE

SEQ ID NO: 187 - protein, 580 aa, synthetic construct
MPTGYAYIRYSTRRQGADDKDSVTRQKSSIRAIAARHGVEVPEENFFYENGVSAYTGENSKTGKLKDLIDQIENLSIAPGDFVFVESIDRLSRQRLLQAKDLVYGILKKGVILVTTMDGYIYKLHEDQADIMKQDIMLTVISSRAHEESLTKSNRRKSAWKKAKTEAEETGIVFNKNRLPYGVIFEEKTNTLVIDKKAQEEIEFILENLKREGVTSTIKKANAFAAINWTQARVKDIFDTKYVLGYFMSQTKIDGKMVLDKHIENYYPKIVSASLFLEAKEAMTNRKVKKHQGRVTQNNANIFRHSCFCERCGKSLVFMNNYNSKGSRYFYMTCQQNIENGNCKNRFRYDLAVKLFLDTMQEFDRLNKKSVSLEPIDVTQYANLDEATLKEIEEVNKSLSMISDGSSGAFKLAKKFVELSKSNKVEDTKTRQKLKKLRDRQSDLEISVENLNKSVGTIKSGIIPSAILNRLSKEEVELNEIKEEIEKLAISKNKSKVQELEFTNLDKTIDFLKTEEGRLNIINFLTSNNIRFSFEYISNTLNSTAYVNNERIGQLSTQNDNKSAPLGIYGFDNLGNVFTQ

SEQ ID NO: 188 - protein, 460 aa, synthetic construct
MYPFYQILAIKERMGTMQNVRIYARVSTAEQKKKDISIPVQLEACRRYCAEHDYNVLGTYIDNGYSASSIKKRKEFQRMIEEVRRDEYILFTRLDRFSRNILDANKIVETLDQKNVSIVSIFEDDINTSTADGRFMFNLRVSLSQREIEKDSERILDVMAAKLAKGEVLTGRLPVGYKIKNKKPVIDESKAEMVKDIFKTYIDTGNWGLTARIISAKYDTYVSDTKVKWTIKNRRYIGEFRGISNYFPKIIDEATFFEANNISKNKYIKHSRNDVTYLFSGLLRCEMCGRRMASSHRKNKPNSNYYICSSRKTGKTVQHFAKSERKIEATLLNEFEGLLNDKILELEKAERKQSKKSDNTSRINNLKAKMKRIKYLYVDGFMDENEFRARYKDMENELIQLEINKNEDVMQKKEHYQYLIDSNALTLYKSFSREQKAIFWRTIIDHIVVHKDGNLDIFIR

SEQ ID NO: 189 - protein, 545 aa, synthetic construct
MPAAIPYIRFSTGKQRHGNSEERQHQMVMSWLGQNPNHTLSDLKYSDLGKSGYKGDHIKDGGGFAMLLEAVEAGAIKPGDVVLVEAIDRTGRLSPLKMLNTIISPIIEAGVSIVTLDDNVTYDSGSIAGGHLFLLVAKIQAAHGYSKQLSERVTASYGIRRQQAIEGKSIKRWAPIWLTVDGVLKEAIAPYIKQAFEWYVSGIGKTTIANRLRGSGVPELATCSGPTVEAWLRNKAAIGTWEYHKGKEDAEDIPNVYEPVVTPELFMQAQRRKKEVATKPRERTSKHFLVGLVKCGVCGSSYIIHHKDGKPNNLRCGTYHRLKKAGCTNDETIPYQVAVYIYSETATHWVDKALQKVQLTVNDKRKLVLENERDTLTASIKTLTEKAVALDIPELWNKLEEESNRRKFVDEELSVLERTPDAGGGFAAVLAQDQMMIHDPIQLSALLRQVEYSIVVYPNKLFKVAGELYPWLYLGPKRKPKSNVTLGYRILYLGQEAIISPVLPMTLDWGKPTDNPVEQMRYYLRRAYKLVSAPQSYEYNDDVPE

SEQ ID NO: 190 - protein, 464 aa, synthetic construct
MRVLGRVRLSRLTDESTSTARQREIIEQWSQMNGHTIVGWAEDMDVSRSVDPFDTPDLGKWLTKPEKIEQWDIVATWKLDRLATGSIYLNKLMHWCFENDKVMVSVTENFDLSTWVGRMIANVIAGVAEGELEAIKERTRGSRRRLLQTGRWPGGTXPYGFRTQELPGGGWRLTTDPEKAAVVVRIAQDIINGLPIEAVSKALNEKGVPGPAGGKWIPESVWKIIESKVLIGHATYKGDTVRDSEGRPVLYADPILDQETWDRMQSAIQLRKHPEAQRYNQTSPLLGVIFCYDCEQKLYYKIYKRPNKDYRYYYCRDHKQLLNADEIEDLLEERFLELVGDELADDRIFVPAESHQIELDEATRAVDELTALLGTVTSATMRSSVMGQLQALDSRIAELERLPSKEAHWEYRKLDHTYAEEWQSSDTDGRRRLLLRCEITAKASKGHFHFNTPEDLLERLRSSV

SEQ ID NO: 191 - protein, 560 aa, synthetic construct
MFVSLDMRWKVMTIAYSYLRLSSKIQLNGQGKTRQLEASRQAAIENGWQLSEMTFEDLGVSAYTGKNVTTGAFNQILRLIESGVIKAGSVLIVENPDRISREGVNESAALMLQILASGVQIYTIFDKKLYSGSKDTALIDLLMWGVQAQRAYDESKTKSKRVRDARKRAREKARAKGKSSVTVLPSWLRRVKGEDGDTYEIIEEKANLIRQLFKLKLRGYGYVQMNKELEKMGLPYVHTATIVHYLKSQSVIGIYQPITKAEGEADVRIPVGDPIENFYPPIVDRETFFKVQAMFSKPQKGRIANKHFNLWRCRIKCKCGSTMHLQRVTKSRNKNDYEYFYLRCPKTALQACPNSFGGVDYPRFTKLALMSIDCLNWDALTNDSKLNDLVAKRTTLEGEKELLEKRIESLLDQLELTPSAFISKRLASLEEEYERINKELAATNHDVEVEESLEGMLKNESKGVECILGMSLEEISTLKPIHLDIWGRLDHLVMGEHEEGCPEVQVIDRDGAVVSTIRMDKKLTRATIESNYSQLAEVAIYDVRQVKKKIVDEAELVEDN

SEQ ID NO: 192 - protein, 515 aa, synthetic construct
MYRPQELDVFIYLRKSRKDLEEEKKAMEHGQHYDTLERHRTQLLELAHKEHHNIIDIFEEVVSGEYISERPMMQKLLREVETGIADAVLVMDLDRLGRGDMVDQGTIYRVFRYSETFIITPTEIIDPNDENQELTFSIKSLIAREELKTIVKRMQRGRRVSAKEGKSISRVPAYGYLRDNNLKLYPNPEKSWVIPKIFELMANGVGRQAIAQELDRLGISPPEGEYWNPSTISSITKNEVYLGHIIWGKMRYTKQNGKYIRKKVPKERWQRHDHAHTPLVSEELFQKANIAHSKRWRPPTIKTKKLSNPLAGILLCKLCGHSMLYQPRKDRPNPQVRCVQPSCKGIQKGASLALVEQRILDGLKQIIESFEIQENMVQKKHSKNNIQLQQKALEKKEEQIKDLQKQKNTLHDLLEKGVYDIDTFLERQKSIMIRLKTIQEEVHQIEKDISHILEKERHLHEFVPKIKNVLEAYHLTKNIEKKNYLLKSVLEKASYLRKKTSKRKDEFIIELHTKI

SEQ ID NO: 193 - protein, 550 aa, synthetic construct
MEILEMLRDLSKGRPITAALYARYSSNAQNDGNSIEAQVKAIEDFAGREKIVITGRYVDEACSGTNADRPRFQDMINDAKNMLFNIVLVHKYDRFMRDERTGLIYEDELKRYGVFLISVAEPINSDEPINDVTKSILRSYAAYYSKNLSREVMKGMKINAQNGYTNGGTPPLGYDLESVTTGDGKSRKQYVVNEEEARIVKLIFQMIIDGSGYIEIINRLNAMNYNTKSGHPFKKNSIHDILRNRKYQGDLIFNKCTGKDPFSHTRNSHKYKRPEDWIIIPDGIPAIISKEDFKKVQDIMDKRKQIRHPEYIVPYLLSGKIICGVCNYAYTGNYNRSPKYKEPYITYRCGNRASRGSSCECKNKPIRLNEIEPFVLTTLSKSIFNPRIVDTIMDRFKKYVQKRCKSNSADIKRLQSSLTDYRRQESNLLKAISETDSDIVRKSILSQLESVGIQKEQAERELSDMKATTTAIPDKNVLKKLINTAKRQFLSGNLKETKEIINVFVDKIIVGIDNVDLKINLIPSFVCKPGFQDTITISRKELKRYKNKVS

SEQ ID NO: 194 - protein, 696 aa, synthetic construct
MMNDPHQKVQASHLKRNAYVYVRQSTLRQVFENTESTKRQYGLRQRAVALGWTEERIIVIDSDLGQSGASSDREGFQRLVAEVGMGHAGIVLGLEVSRLARNSMDWHRLLEICALTGTLICDEDGAYDPAHFNDRLLLGLKGTMSEAELHVLRARLQGGILNKARRGELEMRPPVGMVYDSEGVLGLDPDRQVQHCLRWLFATFARTGSARATVKAAQREHLAFPRRCGKGAHKGELLWGELCHDQVLRVLHNPRYAGAFVYGRSHTRRSVDGVARLQRMPREQWITLIPETHAGYISWDEYEHNQRRLHESAQAMGADRRRGPAREGPALLQGLVLCGRCGMRMTVGYHSRHGQLCPEYVCQREGISRGEAVCQRIPGSGIDEVIGALLVEAVNPVALEVTLAVQRELQSRFEEADRLRHAQVERAQYECELAQRRYLRVDPDNRLVADSLEAHWNDKLRALAEAHEEYARRCKQDAHVLTQEHCSAILALASDFPRLWSDPATPDRERKRMVRLLLEDVTLNRDEQISVQIRFKGGARRSLHLPLPLCSWKLHVTPSTVVEEIDRLLNDHTPLQIAAILNERGVTSGAGAAFHPQLVARLARNYQLKPRYERLRERGLLTLEEMADKLQVTPTTVKIWLRHGLLRGHAYSDKNECLYEEPGDDAPRKTLGAKLSQRRLDATVLSDRTKGVQYEA

SEQ ID NO: 195 - protein, 520 aa, synthetic construct
MKKAVYCYARVSSRGQAKDGYGMSRQQEMLRDYVAAYDDSQHNRGYELGDISWLYAEGVSAYSGKNIEDGSVLKTFIDDVLQKKITNSVLVIENLDRFSRAAPNRAAGLFLSLINAGCDIHEVETEMIHHQYSDLNIISGGLQRAHNESKRKARLSIKNWDERIKNTIDGTSVLTHRVPSWIEVKNNKYVLKKGESEKYNLIFKMYADGFGPAAIRDELKKRGMQINEREPTINHLMKIIKDQRLIGRFNSTGRKILDGMSIYPVVVEPELFEAVNDLRKQRNPLGKINVKANNLFAGLCICMNCGRYVQVNSVDKKGDTYFRCGGSLVKIDKCKERGFKYKIVENALLEHLRNFDFSMLRSDDNDIQVKINYLSMELVSNEKYSNEILADLEKEDIPDPNDRRILKNIQRRISEIRNEITILKQSNIGYETFNDLKDSYTDDLLDPKNTKLRLDFNVKVKRVIKNIKMKRYDNTIMLVVSYVGVNEKQAMVINSKTGAVVFMAVQNDDLKSIEYLINDN

SEQ ID NO: 196 - protein, 483 aa, synthetic construct
MNAIYCRVSTDLQAEIGYSIGDQIRTCHEHAAKLGLETSSSSEYIDDGYSGEYLERPALDRLRDDLHNKKIKNVIVYDPDRLSRNLTNQLLLADEIEKLNTKLYFVTGSYDASPEGRLFFSIRGAISAFEKAKIRERTLRGKRAKARSGKMIQKSRAYGYDWDDENSTYIVHQAEAAVVQMIYDLYLSKKVTIKDIAIFLRQQNITNQRDKPFTLSMIYRILTDEKYAGTKWSFNKYEKKISQYKRKKISRPQEDWIPIPITPIVTIDQFQKVRQILTENKRKSPRNTKHEYLLRNFLKCSVCGYSLSAHSKKHSSGKEYTWYKCNSGGSDKSLVPCGNPAISSLEIDEVVWKHLCTIIKNNKEQLLLVPQNSTASNAGQIKSIKNHQSELQKKQTTILRWFSEGMLTSNDAEKELNHLKKELQTLSESLIKLSSNPKSTAKIHPEEFFAAKSFIERRAIIEKLGWKFYIDHRVAPIKIRFKV

SEQ ID NO: 197 - protein, 489 aa, synthetic construct
MNPLPVSRTLKAVIYCRISSDKTGAGLGVERQEKDCRELARRLKMQVVEVLSENDTSAYSGAPRPKYERLLEMMRSGSIDAVLALHTDRLHRSLVELEEYVNASEQGSVTTHTVMAGPIDLSTPSGRLVARQLGAVARYEVEHAIERVKAAKLQMAQSGKYLGGQRPFGFEPGRTAIREEEAAVIREIVQRVIDGDSFRAIAMDFNRRGITTTHQREWNALKVRNVALRPINTGIVRHNGIDYEANSPAIIPRDQWEDFLIAVQLNRTRSNHPGTFRKHVLNGFVFCGECGKKMVHKTKVSRGKKSTIVSCESGNRQTGGNGGCGRVARSVDPIIELVRQSIIYRLNSPELVSALHAQKTSAETLKELHAKQRAAEGRAQEVLDDYYVHNLLTREQFERAKVQADAALKAINERIESEYSHAVTSAIDLNGNLEEAWENGTLEWRRDIIALLIDKIIVHRVPRETGYKRPMFCGKWRFDPDLIKIIWRA

SEQ ID NO: 198 - protein, 514 aa, synthetic construct
MKAGDRIEKDPDRRIQEAIALVFDKVAELGSARQALLWFLEQGLDLPVRYTNGEVIWRRPNYATIHRMIANPIYGGAYAYGKSRSVPRYDGRSGIRHEARDEWLALIPDAHEGYVSWERAEEIRKMLSDNVPASRHHGAPKHGDALLAGLFRCKRCGRKLTVRYTGNKHNIPRYSCWRGLLDNGEPRCIAFGGLRVDDAIEEALLGVVEPGAIAAAVEAERTMASQRDQVQDAFLRDLEAARYAADRAFRQYDAADPENRLVTSELEARWNKALARVGEIEARIAKHRTVTPQPFPMTASQVTDLAGNLRTVWTAPTTDTRLKKRIVRTLINEVVADLDDGASEIVLVIHWVGGVHTELRLPKRRRGQRNATPDDIVDAVRQLVLIANDDVIAGVLNRNGLTTGNGNRWTRERVTALKSYRKIPVFRPQIDGVEPWLNLGGAAKLLGITPKTLRLAAEAGEIKGTHPLPDGPWIFSRSKLGTSQTRQILDRVRQNPRHPTGSHPDQESLFPSTT

SEQ ID NO: 199 - protein, 466 aa, synthetic construct
MIKKVAIYTRVSTLEQANEGYSIEGQEQRLKAYCKVHDWDNFEFFVDAGQSASNTDRAGLQNLLNRLDEFDLVLVYKLDRLTRSVRDLMSLLDTFEEKDVKFRSATEVFDTTSAIGKLFITLVGAMAEWERSTITERTTQGRRVATEKGIYTTTPPFFYDKIEGKLYPNDKKEIVDYIVSRAKAGVSIRGITEELNNSVYNPPKGKRWDKSLVSYVLTAPVSRGHTHIGDVFVENTHEPVISEDDYNIYMQSISQRTHSRGIKHTAIFRGKLTCPNCGRSLTLNTSKRTNKNGSVDYDERYVCDRCRSDKSAENITIQSKEVERAFIDFIQHGEIEVNVEDTEEQEEQSVIDVDKIKRQRKKYQQAWAMDLMSDDEFQALIKETDDLLDQHNRQQLRKKENKNNHEQIEATHDLILNVWDKMASKDKEDLINASISNIQYNFYRGHGYGKNRTPNSINVTHIDYKL

SEQ ID NO: 200 - protein, 461 aa, synthetic construct
MKAGVKVAVTKWNTVFETNMSGPSGLSARIMLEVGLHLANEESRVKSERILATNKILADQGIKTTAKTPIWLYRTKDRTGFQVVEENANVIRRIFELRKNGFGAKRIINELGPLKLARYKYNEEGELVASSYNRPLSESSVNRYLRDQTVIGYRDGVQFCEPIVEEKLFHACQQKIRKQKGGKVTKIKNVLSGLAYCEKCGKKMVFGGESISPKGKIRSYIKCNNKAKTGGCNAKSIRYEPLERCVYNLLHTLNDREEITVDIGQLEMGLASAQEQAANAQSYMIRYPNDSSWVGIYEEQKAKVYELNNLIADAKAERSGRLTEMNLDLSRHENKALFNQILKDYDVKAVLGYESTSDKPRVKLVIGAWGDFVVSATVDKSVSSRRVRAAMKLGAEGIDFDKRDRGHIQFKEPEKFVSDDAKRTAFIDSLTKNFSQTMSDQEKQFILDKVQQQNTNQGSED

SEQ ID NO: 201 - protein, 509 aa, synthetic construct
MADKRAVFYLRISLDSRGDGLAIERQRDGCQKKAAALGLDVVGEYVDQSISASGDKDRPGYNAMEKAFEAGEFSTIVCYDIDRLSRRPGQLEQWLERAERGGLNIVTADNEVNLSTDYGRLFVRIKAALARQEVETMSRRRSYAQKQRARKGNPPSGVRPFGYDSERVIIEEEAALVRAMYAAFLKGHSLRDIARALDGDSDVDGLKKCPRPSHTITRERNEVRAREGRAALKVPEPYGWGPTTVRRILRNPIYAGMVTYRATGMSARRDGVTYSTRDSKTTDAIVRDDDGSPIRGKWDPIIAADDWWAVQAVLDDPRRLSSYTGSRERRRLGAGLFRCYDCDVPLKNHGPRYRCDKCGMVRQRGSVDDFVLDVISAYLSREDVLKGLRKAAASLSSDDGSNAAAGRVEALMRRLETFAADYADGVITGREYAAARDKVEAEIAAETKKAAATTTGRVLDAVIHPGADFKKADLLSKRAIIDAVCVVHLRRGEKGNNHFQPDSVIITWR

SEQ ID NO: 202 - protein, 507 aa, synthetic construct
MQQANKERGLYGRLSKNRDGQSQSVKYQLSEGYDFFEQQGWPVCEDCVFSDDNISASEYSVKERPGFVALLRAIEQGKIGTVVVTEVSRLTRDYKIGIDIVDLARAAGGLVIYTTEGQMFDLMTNTGKHNFLEAVLKASRESGTTSDRVKRNKRNSAKEGRYHGGRRPFGRQGAIKDQFGRVTNTGDVGVLILEEEAQHIREAVNHILDDGWPLLSVVRDWKKRGINSPSGNAWSTSTFRKMLLSKHLKGVRDYHGKDYAGAFPCIIEPDRFDKLSALLTADERKAKPGQGVRSYLLTGFIFCSCGNKMGGRKRKRHGREVREYLCRPYDNFGEKVGCYRTRLADATELLVTDAVLYRYNSPAFVEYLKQAYEQDAESDGLADLLQQAKLKKQKLNELEDAWTDGVDGLDLATMLRLKAKTENELKQLNAQIGRRTSGKLLVSLAEGDIHTAWESFDLEQRRQIIGLIVERVVVLPQPQGETTVWTHEKTGQSWCFNPEYIQIKFKF

SEQ ID NO: 203 - protein, 609 aa, synthetic construct
MMNGYEYTDMDAILAGSFRAAIYCRLSKDDDLDGESASIANQRDMLEKYCEKQGWEVVAVYQDDGYTGLNMERPDLKRMLKAIERRQINLVITKDLSRLGRNYLQTGTLIEDFFPRHGVRYIAMNDGIDTMRENNDIAPFKNILNEMYSKDISKKVHSSYLLKAQQGQFTGCIAPFGYQKDPEDKNHLLVDEETAPIVRQIFRWALEGHGPNFIRRRLEEQKVPCPTWWNRERGFRNVRTKWEKKDPVNGRYMWDFSVIKDILMNPVYTGAIASQKKDYRFKIGTIGEKKPQDWIVVEERHEPIVDRKSFDIVQDKLKSRQRSRQTGEISLFAGLLKCGECGKSLTIRYTNDKHPKQIYSCKTYNAYGKQHCTQHRVEYETLYRLVLNKIRECAKAALMDGEAVAGRLTNTCEAEQKGQREALERSLTKHEERIEVLEKMVLRLYEDMVAGRISEANFNLMLDKTQKEQAELKERVEQGRRKLADEIRLAVDAKQWVDAIQEYADITELDAATLNRLIKEIVVHEHIDSDKTRHISIEIHXXXXXXXXXXXXXXXXXXXXXXXXXXXXXXXXXXXXXXXXXXXXXXXXXXXXXXXXXXXXXXGKGGINF

SEQ ID NO: 204 - protein, 605 aa, synthetic construct
MLAIYTRLSIEDDENNSIENQINEGTHYAVNNGFKDNFKIYNEGEGVKGSTTIKKRPKLSLLIEDIKKGDISIIYVRYQSRISRKLKILGEFLEIIEEYNINLFVGDKGLIDMNLPSNKLMIQFFGAIDEFTPNNQSYQTKKTQRLKAEQGYVWGVIPYGYQADSITKKAIINEEESSVIKRIFKLSKEGYGCEKIAKTLNADGVETKMKKMVTNQYSNKEYKDEKKYFSKSQNKIVKVDRTTSIWLSKTIYDMLKNTWYIGQRKWGGVVYPVPPIISKELFNEVNNKLTNSNHKKGKSVNYRFLLKGIIFCEKCGRAYNGNRKYNNKNHNKTSKYSANYYQCASKRLMKHNCDNFGINITNLESFIICHLFKNKELLSHLENLEKKDTALIENKEELNRLTEQIIEQENIRDNVEKSLFVEGINDTTRTRFIKKLNNVEEHVKGLNTKIEHARLRINEIENDRLLNITNQINSYNKNWEFQEYKEAVNNIIDRIIVLGERNEKTFNNKKYHLIQVKYKGYDDYSVFLSKKPHTKWIWLNSVRKMTEEEINEEIAMQEELIKYETGKEIKVTKKEIENIYDGKLLVNENINKIIQLKTEDIIDFD

SEQ ID NO: 205 - protein, 490 aa, synthetic construct
MKNIAIYIRKSVKGDDNSISLEAQTEVIKHYFKNENKFTIYKDDGFSGGNTNRPAFQKLMHDATQNKFKAVACYKLDRIARNTLDFLTTFNTLKEYGIDLICVEDKYDPSTPAGRLMMTLLASLAEMERENIKQRVTDSMLNLARSGRWTGGTPPFGYKVITIDGGKYLELEDKNNILYIFDEFINGKGILKLSSEFNCDKKKISRILHNITYLKSSTEANTYLKQTLKYEIVGTPNGCGYLPYGKNKVINGKKVKNIDGLKIAAISKHKAIIELETFIKAQEKLKTFEGRKAPRISNKSFLAQLIQCTCGSNMLIVLGHKKKDGTRKLYFSCPNKCGNTFGDVKEIEEDTLLTLKDVNFFEKINKNKPTINNKDSSRIKASLLKELENKKKILDGLVQKLALVDSDLANILIDKMETLNENIKELQSKIDLLEKEEISLSYNKEDLNLKEKNRKHFIKEFENMNMQEKQTSIRKVINKITWTGENIIIS

SEQ ID NO: 206 - protein, 530 aa, synthetic construct
MTDTPAAYLRTSLEDFNRAHGLADQSQSISNQRKVILEYVQHNPEFSEVQIREFIDDGLTGTNTDRPQFQAMIEAARRGEVKCIIVKDLSRFGRNYLDVGDYLEHIFPFLGVRVIAVNDGYDSKQYEGKTGGMDIAFRNFMYENYSRDLSIKVRSAMHSRMKKGRFVNHVPYGYQKAPGDKHLMVPDPNTAPIVREIFQSIIRGKSTSQIAKELNTRGVLTPLAYKQHRLKPACQNRELMWSHITVLNILKNDKYTGVMTNHTRESRYMRDKNQRRVPREEWIITENTHEALVTKEEFDAAHAMIREVKRPERKSPPACDTVFYCGHCGRKLRKSHGLDTYFACDTQLYQENATCSNIRWSKTDLEAVMLPVYKAQLYLLGERAKELALQGDGHPNENWPEMVGKIDREIAACQAQKVQYYEAYRNGDLDRGAFVEQKAALAIRIEHLQGERTEIELKRQAQRTQIEARESAKRELSQYLYATHLDGALLTESMYQAIDRVKVFSNERIEIRWKFEDLFAGQGYRERKAV

SEQ ID NO: 207 - protein, 589 aa, synthetic construct
MATKRVIGYARVSTETQDLKRQISLIKDFCNGCQYHYIRTIDEKISGAKHNRKSINELLSVDRTEADIIVVAELSRLSREADIMRVLSIINDILQNGLDVILLDDPNKTYSAYSSLSLFDIMTLAFKANTAAEERQKIINRTTSGKISVLQVNPYSFMGQKPPFGFKVVNNPNYIINHRGEPKTLLEIDENEADLIKYIYNSVLSGTTLRQIARNLNNLGKRTVRNGLKFTESTISKTVRNPLYKGERQYKDLILKITPIISAEDWALATKRLIDNQLFRGKSSKNFNPLKGLLYCPCGYSLLLHYNSGSGFFKYSCVMRNNDPDYRDSKKCQNSGLQATLLLNCVWYAVINTITDLEYLAYNEQEIKEHNQQIKILLDSIENLKVLVNLRIKEREAVYKRISLASDSELIERFEQDYITYGEEISDINHKIIKLNNDITTHKDAISRISKVRTQEQLQHIGEIEKSNLYREKLDRVVYYSVNLLNGFIIINFKNGIQRIIAVRNTGKKYVALLPTTFEFNEKERIVSTTVFPKATIGNYSFDNGTIAKYDVAGLIRALGDDYNIYPQLPKDEIDFKGIAKLKDQKENE

SEQ ID NO: 208 - protein, 484 aa, synthetic construct
MNMRIAGYIRVSTEEQAEKGFSLDEQRDRLISYCKAMGWPAPTIYEDDGYSAKDLRRPELARLLSDVKTEKYTLIITTKLDRLSRRLFDILSVIDYLEKHNCSYVSASEAFDTTTPAGRMTLQMLGMVAEFERERISERVRDNMRSIARKGEKVISRPCFGYEVKNGSLEINLEESLAIHQMARWALEGRGAWEIAKRLNERGITTKDGNQWQDRVVRELLKRETLVGDFVYNRTYRKGTRILTRPEEEWIRIENHHEPILDRDTFDAIQKIFQSRKQSASRYVDETNYLLTGLLVCTHCGGKMVGRKDSKHGKNIYFRYVCNTYMKKGGCYFHHLLRDDLEFTVIGEIKKIAIADPNDLEITVAKTNSEKRADKASIQDRLRKLDLKAQRQIEAYEDDLITAHDLKKAKERIEKDRQHLLEQLKEMEKSEQENAGVIVQQKVKRLLDDVLSLDRMKSKNAIRQLIHHVNISNASEVVITWYAD

SEQ ID NO: 209 - protein, 436 aa, synthetic construct
MEETFASYNVRYIAINDNVDTLNGVDDSVAVRHLFNEWHARDTSKKVKAVIMAAARRGERIGTKAPYGYRKNPKSRKQIIPNEDTAPVVRRIFALCASGLGPDKIARILRADQILTPTVYEFRTNGVRHTNLNENKPYEWCGSTVADILEREEYIGNTINCRSYSPSFKSKKSKRNPLEKQLRFEHTHEPLIDMETWEIVQKVRAGKRRPNKMGEMDLLSGMVYCADCGKRHYFCRCGSWNESQYTYTCGTYHGHKEDCTPHTVKVMALYEIVLAEIQRVTQEAREHTEEFLRRAMDKHSSQLKKELSAKVNELDRAQKRLADLEKLFRAAFEQLALANLSETQFKALTGGYEEEKQELTIRSEMLEQEINTEKERMLNADRFLKVVQRYTEIQELTPEIVREFIEKIVVHERSEPWKKKNYTQQIDVYFNFVGQV

SEQ ID NO: 210 - protein, 495 aa, synthetic construct
MKAWLYARFSSSQQADGDSINRQVKAAQQWCSANGVELQQTSFRDLGVSGWKSIKRPMFEQLIKAMQEGKIPRGSYVLFESTDRLSRRGWRHTQELIRTITCVYDCKLVILDKGQVYTKENVNDVVQNILLMVAADMAEKESQRKSDLVAAAYKSKRQDGDVSRWPFWIDKTDSGFVLNENAETIRLIIALRLKGVGALGIASELNRRGIKSSRGGNWGHTSIRVVLSNSALYGTKDFYSMKTIKQFDEHGEEIKVTDNQLVSSMPDVFPPLCDFTTWQQIQIKGEKPGRKGQSSPFHNMLFCECGAAMGLQIGSAGERYRKCTRSKVGSCSQKMIRNFDETLIECLGRITYESSETQKDELPELQARLAKLEGVKDALMAAGAVDALVDVYKDIAKAKDAVANAQKIAVVPTTELKDVFAGSVDEQRVALKRVISKVVVNRVKNTASIKVHLTNGHLKIFGVSIGVKKQSGVNRFFSETDTEKFLAEVVALNCD

SEQ ID NO: 211 - protein, 522 aa, synthetic construct
MTKITADHLARSAYVYIRQSTPDQLARLLFDPFRETGSACAVVRRLRGEKILFPRRIRRGIGKGDVLWSEIDHSRVLQILHNPRHAGAFAYGRTRKAYNAKLKSVQLRVARSDWQVLIPEAHQGYISWAEYERNQTALEQNAAGFSPGLRGRMPRQGSGLLQGRLLCGRCGARMRVHYEPFEGRLRPYYVCNEAVVRHAGKHCQWVRGAPVDDAVSALLLEAMAPAVIDVAPAVQQEITQRVEQAAALRGTQLQRARYEAELARRRYLKVDPDNRLVADALEADWNARLRDLDALQREHERQNEADRSLLDEPAQERIRALAADFPRIWNDERTGAVERKRRLGLLIEDVTLLVDEQVNIHIRWRGGRTQSLSVTRPRPMSVIRKTPAQVVALMNELLETTNDQQIAARLNELGHRNWRGEPFTLKKVMLVRRTYGLKTRYERLRESGMLTGEEVAQQLGVCASTVHQLGRKGILKRHRYATNHRYLYEPPGNVRLEKGAGSRYGGRPPRLIVAQQLQQGAS

SEQ ID NO: 212 - protein, 646 aa, synthetic construct
MLYAYCRVSSGKQLEGLSMSLQGDEALLSRIAKEYHTTVSDRIYIDEGVSSYKGKNLESGQLGEIVRDIEKGRIKKGDIIVMRALDRLSRQELTDSENLYNRIVGAGVNIYTTIDNHLYKPNCVHSAILKTLALNTAHEESAKKAYLTNRYALHRIEEFQRGEKPENGTAWDIGVGKHPFWIQLDKKVVQPHPVNFEIAKVMVRLIISGKGNREVMRYLEEHHPRYDKNGERIEWSYSIVASFHRKEALTGLLSVKLEDTEYKLEDYYPRVCTDLEFHQMSLRKEEKYVSNGNRARPTLLGGIRRLYCSCGRAMGGITPKDSPAFYRCLHILNPCISYISLRVVDRIVLDAIQTHVFESEKFDDTLLNELLSKADLMRIKYSKQESMLMSDPDLFTPEFKQQLRKFKLEIEQVEQEIITERKKHAVIEDVDLKSYAEWQAAISELQEQRDDEEIIKLRDKVQKLVRRIEIDGQLITISMVDGKKIYRHIVKDNTHDTVYCKVHVVDSETLELVTSTSPELADVYCLESDLERFKSACDINHTFITRIAIREKTDHLGIVQQAVSDYLDEHDVLRWRRSDVMKLGVTTTQWQMYKDPEHMSGTGIVIEELKYKDKSYAKKSAVVAYKRYNEQAILNLLNARSLIHSA

SEQ ID NO: 213 - protein, 517 aa, synthetic construct
MRAAIYVRLSRETENSTSPERQRAACEALCAARGWQVIAVEEDIDVSGYSRGLDRPGLQRILARLAEFDVIVFFKIDRLARSTVDFAEIMKVTQAESVALASASEPLDLTSSMGRAMAKVIAVFAELESDTIGMRVSSAHEHLRREGRYTGGRVPYGYRAAPNPEGAGKILEVNPEEAKTIHEIVERVLNKDSLLKIAVDLTESDKPSPGHSSRQTTGKRSDSKRWYPSTLRSLLGNPQLLGQVIEDGKPILMTDGLPLVNRTPILDMDTWQALQDELSRRANPGDRRREGTALLRGIVYCAVCHNRMYTYVAKGRIRYRCIGRLKARQAGAELTCYGVSIAGEGMEQHVTALFLEKFGAFPVVRMVEHVGEDFRPQIRQAREALEDLEKDRYDRGLFKGEEGATRYAAQYAKLEERLASLNEKQRTAKPAGVETVPTGRTHAQLWKDADTAGKRDLLLNAGAYVEVGMSRKGGPRLDTSRLAVYFGEDGEIRRADADGKDVEAVVQRAAAQTLELF

SEQ ID NO: 214 - protein, 568 aa, synthetic construct
MTVEQFQRPAYIYCRYSSEMQSQGDSLRRQFQRCNEAIKKHNLYVKERITDEAFSGFHGDNLINGKLKDFIDRAIAGDIEKNAFLIVENLDRITRLQPSKAVNVITQILSSGLEIYQTSPECLFTFKNKKDEAMTIIMITLFAQRAHEESDTKSYRIKEAWISRIERILKGEQKILMDKPPYWLDVVEKDFDVNGKTKRLKCYQVNQTRTDEVLLILEYLKSMGIKESCKMMNAESTGKKWTVKAVQRLLQSKTLYGELDLKLSVREDGKKELQSRGLEMPQIYPAIISKPEFDEILELIKIRASGRGGGRKSTQFHNIFSKILFCAHCGGAYRYMHKREYSYLVCYNSEVHTCKYEKVLSLRFYDVQNAILAYGGYFDFNVLFKGVELKEYAADITDKQAELDAKREAFSNMFNSIMLKNNGIISSMYQSSLDMTERSIDELEKEIEALKQKDILNPSKRIKANGGALLLDPALLSTAFGRAKLNAHLKRMVERIELSHNKVTNDGYNLLKVKFIGVETVLEIKFQGTKRIFDDGGQDFSKIFDDDSDGFIDEEEWNKQSSMLNDMF

SEQ ID NO: 215 - protein, 498 aa, synthetic construct
MKVAGYIRVSTNKEGQKESPENQKQLILNFLAENQYDLYDFYMDVETGTTDKREGLKKLIRDAENKQFDIIVAKELSRLGRNVELLYQLKRIAETKGVRLITLDGRVDTQDISKQTMFGLYAWVYESESQRISDRIKSVFHMKCKSGKFMGSIPPYGYKLQDGKLIIRDDYTVEVVREIFNKYLEGWGHDKIARYLTKKQVPTPAQVAGKSNAGLYWQGTTIKKILSNPHYMGDLVQNRETSTNITNKKRKVNTQNEWIIVPNTHEPIISREVFEQAQKLLESKARRGKGRTKAPKHLFTNILYCADCGASMWYRHNRKGYICGNYAKHGNIACSHHAIKEQQLIETILTDLKSIYESFERLDTENQIKNKVHELQKKNAVRLQTIEKQIQKQMDLKRNALQKFINGDISKEDYHDFVSMVQDKLQQLEMEKSTIKKAMVDSQSTTDLSTIRKQLDEFLSFKTLTTEMVLRFIERIEVDNNQNVKIHYKFAPIECVKV

SEQ ID NO: 216 - protein, 402 aa, synthetic construct
MTYSRYIPESITVLTMQINRANGESKRKSVMMKKSHQNRYGNVSKVRPRWFDVVEVDGIKQYRTNNTAKAIQRMYNDYVNGIGAAQIVRTYGDTDNGKPWTLVTVLRALSDKRVADDARYPSIIDKALYERVQAMKLSPSKGNTHQKHMLNLFAGMSRCPLCGQAIITKRNSHGGLFTVCLGKRTDKTCTARSIAYNALERPLLNAIIGLDFSEVYGQEESNVLTLRDQWIQNERDIAAFRERLTKASRHEKFAILDELEVMNREQDELTIRLKSVDAPKDITLTYDDDKLDMNVEYRIELNNRMKKLIQRIDIVREDVSKTNYKIFCSIKYWTELLTHLVIIDVDVQRIGRGGTNQLTTTLRSVSSLDLEGNIKGNPDMEALEYWQNVVSKATQKAIESLT

SEQ ID NO: 217 - protein, 553 aa, synthetic construct
MKTNLKLADAYYRLSVEEANGGESSSITNQRSIVRQYCEDNGITIVKEFVDDGFSGSNFDRPGFSQMITHLKDGLANMVITKDLSRLGRDMTESSYYAETYFPENQIHYIAISDNFDSNEVNIMAPFQFAMNDVYLRDTSRKIKQVINQKRTKGEYCACPPFGYMKNKDGTALEPDPKTAPIVQKIFAMAHDGKSARAIATALTENGDITPLKYRVLYRDNFGERGAARAVDEWNYTTVKRILKNSVYLGHTILGKTKKASLKSKKKLAVPEENWFITENTHTPLVTKEQFDQAAYFMGMNTKNWQGYEKCRSSIFNGLTFCAHCGGAMCSSGTVYKGERMKYWYLSCNNIPKRSKNHCEHGARIKYTDLLEIIKADLNQLISLSDEDKKEIIKQAIQRSGQVNIYENSEDNKSAIKGRIETIDRIIMKLYNDYAAGTISEDVLNATASKMSDEVAKLKKQLSEIERKQSNGNEITNNYEKFFALVKQYEHIDELTEEIVRTFIERIEIEEKVLPENRKIAGKNVPYKQKITIYYRFIGNFQENIVNRQDIAS

SEQ ID NO: 218 - protein, 461 aa, synthetic construct
MEAVIYTRVSDDDSGRSRSTADQEKDCREHCAKQGWTVKAVLCDEGVGASRYSRGEREAFKQLETILQRGNVLVFWEASRSQRDLAAYVKLRDLSARIGAYWCYSGKLFDLTRGDDRFVTGLDALLSEREVDQFRERVERGRRSAAALGKPGAGPAPWGYKPLRDDRTGDLINWVPDPEEARLVRDAARSVLAGESTRSVLKRINAGGVLHRRRPQSLTALRRALMNPQLVGLRKYQGEIVGEGTWEPILTREDHEKLVATLTAPSRKTHHGTEPKWLLTGIAVCGVCGASMATKGNKSSRIYICRANRGCVGRNVEYADEVVKEAALYVLERLDPAIFGKDDGSASEVLAELAESEALLEEYRELADAREISPQSFARFEQKLLAQIESARSRLSVSQRMSAALAIAGPDARRFWASMEANGTQGLLDRRAIVRCFRVTIKPVGRGRKLIPESIGVELLS

SEQ ID NO: 219 - protein, 549 aa, synthetic construct
MKKVAYCYCRVSQRTQRTENGGYGMTRQQNLLLRYIGEYTDTERLGYVLNPENVVYLNAEGVSGFSGKNIENGSVLMDFINDVENGRIKNAVLCIENIDRFSRTNPQKAAMLFLRLIDAGCNIHEAENEIVHHPSSDLNLISSGLIRSNRESLRKQKLSLKNWDRRFDETIKSQVALTARCPYWLDVNDGQYIAVEEHIRAIRFVFEKYNNGYGQASIRDELNKRGWLCNGHKWSAWSVHRSLNDIRLTGRHKSAREQYDGMMMYPVIISDIEFQTAQQRLKSKNRGQKINKRANNIFAGLLICGLCKKSYIGVRFDTKSKRRYARCIQAVDGHCSGIGFSYEALENAILEYVRNVEVKTSTDNSNEIIKLEKELVYAINYRNEIQSDIDKQDIPDPSDRRILKNLQAKVSDIELQINHLKNSESIGYEIKNISDEINEDLLNVENVELRNEFNTRLRKVIQNIYITRYSNNILNIGVHYFSNAGSDTQWLLANAHDGTVYKNMFIEGKRVVCCVGDDIVEYDGYRELYLLNDQIVPKDVVIEALSKYS

SEQ ID NO: 220 - protein, 487 aa, synthetic construct
MSSEPPRATLYLRLSVAGDDASTSISRQERDLRALAEQRGWTIAHVFVDDGRSGRSERANALAALATLADGSADVLAVWKFDRWSRQGLGAVAALLDVLDERPAALFVALQDGLSSNSPAWRIVASVLAEVAKMESDNTRLRVRSAIDTVRRSGRFSGGVVPFGYRSVDNPNGPGKVLEVDEREAAAVREVAERILAGSTWNAEARRLNETGVLPHRAQAWTRQTLRGVLLGDAVVGRQTHRGEVLRGPDGLPLQPWEPALPLATWRDLRALPASESASGSGTRRRAARLLSGLLYCASCDSPLYVSRVKRDAKVYESYRCVARSVGRKCDGVVVSAPQAEEHVSAVFLRALGSWPIYRDESSVDPEAVERLQMTEEALDRVAARIRDVEDEDEEARLLAERRMLRRGVSELRAAVEAPVVRRTPTGETFAEAWERAETFTRRQYLQSAIDHVLVTKGSPGRKALDPGRLSIQWAYPTDDRLLAESD

SEQ ID NO: 221 - protein, 501 aa, synthetic construct
MQKQNGLAYSYIRFSSKKQEQGDSVRRQTELAEKYASSNNLTLSEKNFQDLGISAFKEGNRPSLGDMLSAIEQGAIESGSTIIIESLDRLSRRGIDVTQQIIKSILQHNVFIASLTDGLLLNRESVNDLVSVIRIALAADLAHKESEKKSQRLRETKQQQRKAALEGKVINKILPFWLSREKDQFVFSDRFDAVKRIIELKKKGLGTNKIAKTLNDEGFKPLRSAGWNHTTVGKTLSSVALYGAYQTSETTKDRKVILLDIIDNYYPAVISKEDWMLLQSDAKQNKPGYKSDKNAFTGLLKHSCGGALVRKFHVVTGKTYQYHVCANARDGKCTVTQNFKNMEIALYKILKHLKMEKKTSVDATIAQERAQLKEQIDNLNGMLLTMKKVPMSVLETIGNLEEKLQELDQQFKQQSDMVLAEQSVDFNLLSEIKDPIELNMMLKRVIKEITVFNLKKSWRIKVQYLNGHSQSFRWDGYSMSFVSDSKKLLEYMNAEKEQLDN

SEQ ID NO: 222 - protein, 528 aa, synthetic construct
MYSRYAIDNTIFKIAIYIRLSREDGDDMESESVTNQRSLLIGYLKAQGLVAVDIYVDDGYTGTNFERPEFKRMLNDIENGKINMVITKDLSRLGRDHIMTGYYVETFFPENDVRYVAVNDDIDTFFETSGSDMMPFRLSMNDMYAKDISKKVRSNLLQMKKDGKFCGSSAPYGYMRDPLDKHKLVPDPETAPVVKRIFDLYVAGYGSSQIAEILTREELPTPVMYKYSDSKLNRFDHPEIWKHTSVSNIIKNRVYIGDLIQHRFQKVNYKIKKRKSVPESEWCIKENAHEPLVDRKTFEIAQSIKDSSNNYNPERRNVDYVLSDLVFCKDCGARMSISYDKKRDRVTMNCNNYRKFSKYDICFSHYINYTKLENTVYDKLSTMANQYINDKEEFENIIKSQYVDPKADKLKKIEELNHTINDLKRKQDSLYDDKFNNVISVETYQRLFNATEEDIKTAKDKLEQLQNEISSINDDSSCYVEYLDIIKSFLDMKNPTREIMNRLIDKIYVTKDKKLEIHYRIKKSEVLI

SEQ ID NO: 223 - protein, 590 aa, synthetic construct
MKGATPVIPAYLYARVSSLTQTSDGHHGIERQVETLTQWLEHANSCIDEASQRANTQLPHIDVENVTQLTDQGYSAYKSANFEHGKLGLLYQQCVEGRLGSCWLIVENIDRISRATGIIAIHRISTMLLNGVNIFEIETNSCFSTLINDSCVGLSISLQRAFQESERKSIMSKKSFYRRIKEYRECKKPLINSKKHIPRWIDIVDGEYQPNELAKTINFIFEMYNEGHGNAVIVQRLKELSLKDHNETNWNTIKISQLLRDERVIGVLKNKNKKNKENYHKIEGIWPKIISENLFNSVQSKINRHPSSHIDRTTKKQQNLFNGIIKCLFCNKSIAAIPNGKGVVYLRCTTHRSKDDACKLGLSLNADIIDPAIINFINGINWEEVYSISNKEKSDVEKLRLEYVNLTNEISELISEINDADDRIIMRLSRLLGKKQQQQSKIESKINSIKVNYNIKNVDIKTTQNIFNRKNISIRQNLNLELKKIIKTLKLGKLSDTFALCELEYFTDKISHLLIINLKKSIVTSWGVYRKRNDDSIWFESNFITFEVNNPTNTGWPKDIIAFKESLSSSDLVLFTIMENTIIRAYELIN

SEQ ID NO: 224 - protein, 529 aa, synthetic construct
MASSSRRRAILLARLSDNRVDVDLTDEGIPSGLDDQLRRMQDRAGELGWDMWKVIKNPRLSAYKRRKVVLPDGRREYRVFRPDLREALADLAAGRANALLCLDLDRAFRDPKDLQDLIDVVDHSPHDIVVESVTGSLHMEKGRDNFDAEIRVLVANKASRDTARRVAAARERQALNGQYGGGKRPFGFCSGPPKIVPDGGRTDEAVCAWHGGRDCQSGVTPIKAETEVIADCSRRLLQGVSLRSMALELRGKDVPTVTGAKWSAETLRDVLLRPRNAGLIVYRGEVLDGVTAPWKPIVARETFEEVRALLTDPGRETAPGAPPRWTGSGIYRCGLCTPPSSKTDKPATCHVTRGGTNPRYTCREYSHLARNAYRTDEVVFAHVMYAITHPRAYELLAPAAPDVDAAALRTEKATIRKNLERMAEDEVLGLRTRAQVLAATRRANARIGEIDELLNMTLTEDPLAEVVNAVDPVKVWKDMPLANRRIIVDRLCTVTILSARPGRRFDVASVRVDPKHPLGATPPEFLGAG

SEQ ID NO: 225 - protein, 506 aa, synthetic construct
MNVTMYLRKSRADLEAEQIGEFETLAKHKAVLLDVAKKKNLNIVDIKEEIVSGDSIINRPQMIKLLQEVEDNKYDAVLVMDIDRLGRGGMKDQGLILETFKYSNTKIITPQKIYDLDDDLDEQMTEMQTFIARQELKMIKKRLTRGQLKSFRDGNYVFGDPPFGYKNQYDCAGKRHLVQDENAETVYLIYDLYVNQNLGVYKIARYLDSLGVKPAKTDSWHPTSVTSILKNKAYCGYFSRGRVKQTRKLNENGNYIFEKQEEDKVEYIKANIKPIISVEMFERAQTIRSGKLKHRGKWPIKNPFSGLVVCGKCGASMNYNTKDVGIYLRCNKTCGNRQVRFEVFEDIVIGALQDTLDSYKIPVNKIDYEEKDKSKESEDLFIINKFESELKELEQQKIKLYDLLERGIYDDDVFLERSENLKYRITNIKGKLKELEKGNINESPKKTEKEIIDGLKNVIDLYPTITNIEKKNSLLKAVIKKIYCIKEPNTKKDDFKIEIELNLDIN

SEQ ID NO: 226 - protein, 422 aa, synthetic construct
MKVFLYERVSSEEQVKHGYSLDAQDEALREFCEKHNHVILGVYRDEGISGRKPYTKRPAMVHLLQDVETIKPQMVLFTKLDRWFRNIKEYYKVQDILDRYKVDWKAINEEYDTSTASGRLYVNIKLSIAQDEADRTSERIRDVQAHQVAQGKILGGKPPLGYSFKDKKLVQNEDVHIVREAIDHYKMHQSINATTRYINDLYGLKFDHRSILTLFRNPVLKGEYRGNPNFCEPILSEAEWDALQEIIPRNIKQATTRVYLFSGLIICPYCGRKLGGCADHRRKYYRCVQHYYSTCPMKHTVNEKKLESWLLDNIEEDFKVNVTMKPREKKESPAKYKQRLKRLNDIYLMGNISESEYKSKSAELQRTIADLSRIEPIKEDHFTAGWKDVYEMLDEEHRRSFWRNIIKAVRVDEDAQPIEVIY

SEQ ID NO: 227 - protein, 406 aa, synthetic construct
MPQLYSYVRWSSDKQTKGTTLERQMASAKLFANDNGLDLVEIIEPGVSAFKGKNAKDGKLGDFINAVEAGAIERDSWLYVENLDRLTRQSATEAQTLFIRLLNLGLTLVTGMDKRIYTLDSVNNNPTEFMISILLFSRANEESKTKSERTKGNVLALIARHKEGLPVNIKSVGKHPWWIDDSGSQYEAVREDEKYWPIAREIIDLYLAGKGAYKVKRHLDTKYPNGYEGKEWDYQMLIRMRKNKALYGERTLNINGKAFKLVNYYPSLCTDEAEYLRLQELKRKNDYQSKDKDDVVNIKLLSGLSLLRCGKCGGTMSSFMNKEKPRYICLNGRHLQKNCHGWSVNALLIEYCLIATLVIGYINDKKDSQIDNTENTSLLEKDLGELERLDKTIANVSYALEQGVNL

SEQ ID NO: 228 - protein, 566 aa, synthetic construct
MNKHVFHNSVSKQPDATKRVATYYRVSTGRQYANEASIPSQRKITASFADQNGYVIIEEFVEAKTATDDRRPVLQDMIERACAPDHPYDAILFYAFNRFFRNVAEMELTIRKLRKHGVDVVSVTQPTGDDPSQILVRQIIGAFDEHTSREISKNTTRAMRESAKQGFWNGATPPLGYKIVEAERRGQKIKKKLDIDAVEAETVRLMFKLYLEGDGKTGPLGVKETTKWLNSHGYRTRRGATFGVGPVHKILTNSCYATGQWPYGVRSSRDGRKYDPSTVIQIPVPVLIEQGDFDRVQAKLARSNPKTTPPRVVNGPSLLTGIAVCASCGSGMTRTGTTNRQGRSYSYYSCAGCQQKGKSVCKGRHIPAATLDEIVLTNLKQCVLAPDRIADLLKSLIERQAAKSESADGRLLGLQKELTDCEDRMKRLYRSIEDGIVELDDILRERTAALKAQRDRAKAALDHARAQCGMAAAVNAEKIDAFARLMNAKLDAGDTNTRKGYIHSIIDAVEVDDQTIRIIGSKDILQAAIAGKQTENGNVRGFVRKWRARHDSNVWPPPSEGGALSS

SEQ ID NO: 229 - protein, 623 aa, synthetic construct
MDLNTQNCCIVLTRVSTNQQDYTAQVDDLTNWANSLGFTNIKVISTKESGFKTFDLKEGFKQVVDFISCNKEYKTILVTELSRLSRRQTVLFQIKQYLVDNKIQLFVKDISFSLFDANGMSNFATDIIFNTFASMTEHEMNTKKVRFRRELDSLQAKGISITGKELFGYRREYDETIRKNRFVINEHEANEIRTIYNWYLYGIDGDKTKCNMKDINIACISKGFSRYLHSKRNVTKALGERAYIGHKITNNWQKNTEYWSYGDKTKEKYVRSHTSISYPRILSDELFNSVQEKKLRNNTTADKCNKHITLLSKLIKCPMCGLYLGGNYRYINGYVAHSYRCTRRQMAINCSFKGTYSMALLDSAIWCYIKGDITNLVDKMQRYYRSVSTNSINKEIENLKNKINELENDKRHEVNIYRVMSKSDENKAYIEFCDKVSLINNEIEILKNKISDKAKLIERIELNRRTNNERDLKKEIQNIENDKSELKKYINLFVKEINILYNSVSYLVLNVSIIKDVIKSTIKIDSMEIDTFNPYYNTYIIIDKHDNNRIKMRCISGDICKFENDCFVINRYNIFLNEIFTTSCIDTNGNLQRRNRELNNEEIRFFCSLNEVNYRRLNVYNNE

SEQ ID NO: 230 - protein, 469 aa, synthetic construct
MSPLYRVAMYLRQSRDRDGNELAVSRQREDCLTLCHGRGWTEVVEYCDNNVSATNRRKVRSQYQQMLADISAGMIQAVVVWDLDRLYRQPRELEDFIDLADAHHLALATVTGDTDLSTDNGRLFARIKGAVAKAEGERKAARWKRSNEQGAAAGKWTASYRPFGYTWDGEPLEPEATAVREAYRDVLAGKTLRRIALDWNAAGFTTPTRYKNGQVTHAGKPWTNIQVRRLLLNPRYAALRVLRGMVVGRGVWTPLVDEDTWRGLCAMLRDPARARCTTFEVAHMGAGVYLCGRCGSPLITAYDKHGARLYRCKVSPHLSRRADKLDDYVTAYVLERCARDDAAVLTAEPEGVNSEDLHTAREALVARKDELSALFTDGVLDATAVRRDAAKLTARIAEIDRQLADAVRTSPAAALLDATGEQLWRRWEQMTPALRGQAVDELATVTVLPSPRGLRRFDPDYVEITWKQG

SEQ ID NO: 231 - protein, 620 aa, synthetic construct
MLLSDIILSLSEQIIVMIQSIDADSKSVKPLVHVTIYCRVSSLMQTDGYGLQRQQDAIRAYLEDFDVPKELGYEIDRDNYVLLEDAGKSAYHGYHFSKGQLGQFRQKVLDGEITSGLFIIENVDRFCRMEEYLAIQEFTNLINNGIDILEVDTGEIFSRKVRKSLNKLTVSIERAYAESERKSRISTRSWKNRKRKSLEEGIAINNNTPDWLSLSEDKQSYIVNKERVEILNQIFKMYAEGFGGTAIVNKLNKEKRYYNKTSWSTNKFYHLLRNRRLIGFLGDERHYPAVIDSILFEQVQSLLNGNVRKGKKAGTMMRSIFNGIAKCGFCGNGMICQTMTSSASYLRCIAERSKTTKCTHAKLIRYKESEQVILEHLCNINWDELKKGNSTHRDDIDVLKTQMSIITDKLQKLDLLIQETEDDDDKISLINIKNKNKKELAAIDEKISALTTNLEIPDMEVLSSLKEIQDLDNVELRQKVYSLLSKTVSSIECTRTDSPDPFYTFIINYIGASEKHLLIVELKNNCKVTRFVEKITDDIVTYYTPSFVVAYSNNWESGLPEIRGLQDCDGITIKAELMDCMHLFSILDRTNRGEAKVIRDWLVIPRVQEFFFHTSAYEGE

SEQ ID NO: 232 - protein, 561 aa, synthetic construct
MARTKNRGFQQSFSPSYAVRRWRLGAYIRLSKEDLKKAREGKDDSNSVKNQRDLLGDFYFKHQDEFESITEYVDDGHTGTDANREDFQRLLADVMSGKINCVIVKDLSRFARNYSDAGSLIDNLFVQMGVRFISLAENVDSYRDPDSVSSIIVPITNVMNDQYCYQTSKKIRQVFDYKRRNGQYIGSFAPYGYLKDPKDKHQLIVDPDAAEIVKLIYDLCLQGMARRAMVYYLNDHGIPSPTTYRREKGLPASSTSDNPLWGDKIVTLILTNPIYTGDLVQGRRRVKSYKVHQIEQVPEEEWVRVSDTHEAIIDRETFEKVQALLKRDTRTAPRKKELHLFSGFLRCADCGKSVTRSQSGQSYRYLCSTYKNRSRTACTMHAIKHERLEAAVLFAVRQQVHLAVSYSEIIARINSAPVKKSQSFRLDDLIAAKERELAKVTRYKQSLYQDWKDGEITQQDYRDMKADYERQAASLSDILSRLTAERAELANGVDNEHPALVAFMKYQNIETLNREILIELVDHIKVYENGNISVKFKFSDDLRRIAEYIEINTTQNPAVAG

SEQ ID NO: 233 - protein, 542 aa, synthetic construct
MSRKSLPRLRRRAIVYIRVSQEKEEGYSPQQQLASCLPFATQQGIDIVDVVYDLDKTGRDFAKRKIMRIIQRVEAGEAECVLVWKWSRFGRNIELSKRHIRILEEVGGELLAATEHFDTKTTTGKFGRDQMLLISELQTNLIGDSWKETHERRRKSGRPHNGRERFGYDRCPDCRRSEDNPRAFVRCKTCEGILQPNSVIEPFYRAAYYRYLGLKDKKLNLHYSEESVASIVKDSVKLGIRSTEGNYLTATTLLQVMDTGFAAGYIRARSEELRESKPKNNKPESFDIWIKGKHKAIIEEEVWEAYKRKRRKAKGGHDRAPKYAVSGLLRCQGTRIDNTACHSKMVAASLMRTKGGYRKIMRCPHVPNRSCTGAAVSLDRVERLVYEWLDERVKASDMGELALQRMTAADSAESKLTLIETDLTKIKTKLSKLADGWLEGLIDAETYSDKKEEFEADRDTLESRADLLRESISSNRIPNSAALLDLRDLWPKLTNHEKRNALKTVIDHIKVYKATGRGDRARIEIIAKWDAQAQADPFELVS

SEQ ID NO: 234 - protein, 592 aa, synthetic construct
MKITLLYYIKKFNIYCNRYLSQQINISVDIIGFYQFKNVTNSVTDVLKRGDNLDRICIYLRKSRADEELEKTIGVGETLSKHRKALLKFAKEKKLNIMEIKEEIVSADSIFFRPKMIELLKEVENNQYTGVLVMDIQRLGRGDTEDQGIIARIFKESHTKIITPMKTYDLDDDLDEDYFEFESFMGRKEYKMIKKRMQGGRVRSVEDGNYIATNPPFGYDIHWINKSRTLKFNSKESEIVKLIFKLYTEGNGAGTISNYLNSLGYKTKFGNNFSNSSIIFILKNPVYIGKITWKKKDIRKSKDPHKVKDTRTRDKSEWIIADGKHEPIIDEKIWNKAQEILNNKYHIPYKIANGPANPLAGVVICSKCNSKMVMRKYGKKLPHLICNNKECNNKSARFDYIEKAVLEGLDEYLKNYKVNVKANNKTSDIEPYEQQSNALNKELILLNEQKLKLFDFLEREIYTEEIFLERSKNLDERINTTTLAINKIKKILDNEKKKNNKNDIVKFEKILEGYKKTNDIQKKNELMKSLVFKIEYKKEQHQRNDGLLYIYFLSFCVRCISYLTQFISFFVYPYRILEIYLTFSFFIISYEH

SEQ ID NO: 235 - protein, 564 aa, synthetic construct
MKTILCVIRTSTEEQETASQKKDMLEFCISRGFKEEDIEWIEVAGASARKQNEKYVQMIALIKSTILNNPDIKNCALWHLNRLGRVDSILVEMKNWFIENHIQVYVKNPSLTLLNSDGSVNSGTEIAWGLFATMVKQDTEEIFAKMRRGKKRNSEQMKFNGGCETRFGYRVDNSGYIVPDVKESKLVKLIYDEYVTGKWSAIKLAKELKSRGIKQRNDKDITWIFVSKVLSDTAYIGYTDNDNAKSHRKFTPIIDQDIWEKVKMIRENHIFKRTSKESKRTSFGVGVLKCSCCGSHYIANDKYYVCYKKKNTSKFNGACTDAARIRTDVFDELIWDIASTIHIGYLQNLDEKSITQYESEKAVLLQKMNESNNLLMKLTERKKRVVNLYADGELTEAEFKGKKGKLIADHIHHQNKMLEYGYEINRIDRTIADIRKPSKERIMETFLDVMNEGNRLKCKEIILKHIKVAYLGNVVENGKKSVRIEIEANNGTKYTFLQHKTRNDAKQNNLYVWSEQDGKFIPHINGSYRKNILSDLKSAGIERIELPNADEDTISHKDDLDYRL

SEQ ID NO: 236 - protein, 416 aa, synthetic construct
MKLIKHIIIAERAHQESLVKQKRIAQVWNHKTQLARELKKPMGKQAPGWLELSEDGSHYIVDEDKASLVNLIFDKRLSGLSMFAICKWLNEQGYPTINQRKVRISKTQKPDGNWSALSVKHILTSRSVLGYLPAKISTEDRKTVLREEIEGFYPQIVTDSKFYAVQQLLEETGKGKTSSGEHWLYVNILKGVVRCKCGLVMTPTGIRKPVYQGTYRCNGNKESRCNYGTVSRKLLDTQLCSRLFSKLSQLHDEATDTDRLDELQRRLTTVDIELEKLTETLIQLPNITQIQEALRVKQEEKDELIAQLSREKARVKSVSSLDLSGLDMESVEGRTEAQIIIKRLVKEIVVSGNEKLVDIYLHNGNMIRGFPLDGKDDHTLTLEEATDEMQPLDDMLIFGEPVTRVYPAGDMEEVDA

SEQ ID NO: 237 - protein, 545 aa, synthetic construct
MGKAMDPAKLCDLFLRRSTLQDDKTTLKAHESDLRQRAEREGLTVRKVWKEELSAFKAGVIREEFDAAISAVLAGEVRHLLVWKLDRLSRKGMGQVGQVLDQFEVKGARLLAHMDGLDSSIPQHRGLFAWLAEQARSESYNTSMRTRRTKAAKKITGEWPGGQPPFGLRVRKGKKATEEHPKEYGTARRIADALLGNQAAGVIAGTLNADGVRTRRGSKWRSSTITQLAHSPAWAGLMPVHERYTDAAGRERWRATDEPMIGANGEPVCVGKGVITVGERVRILAALRSRTSESLAAGRRGKPAAQSLLSGLLKCGRCGGNMTKGGPQYRCYRRVNMGKAACQGMSVLVKDADAVLSAAFISRVSHLPDDHEAFRSLAPRWLEYDKPEESARRAELALTVEEAQARLDSLDDAYYVQGRFKGVKGKNRYEQLRAAIEDQLEPMSAELAEIAASLDPEVLRDPDVLHKAWIAADLVRARMLLRVVLHSVTLLPPPGQGRRSSIWALYARCCFHWVGSKPEPLKVDNGRLHNTVWFDPQPAAWQSAA

SEQ ID NO: 238 - protein, 503 aa, synthetic construct
MTTRAAIYLRISLDAAMDGLAIDRQRQDCEALAEQRGWDVVHTYVDQSISASKKDVDRPDYDAIVASFERGEIDAIICWNLDRLTRQPAQLEEWIDRAEEQGLKLVTENGDVDLATDGGRMYARIKAAVARGEIERKSMRQSRAQQQRAEQGRWYSGGVRPIGYTSTGEIIPSEAAAVLGMFRAVERGNSMRDIARALSGVDQPGLPDIPTTPRHMHTVVTERNARRRAAGQEEKSVPDAQPWAYTSLHSILRNPVYAGYSTYKKAKRKGVKNKYRRVTHIVRDPDTGEPVKGQWEPIVTPDLWWRVQNVLDDPDRLTNKERRNTRRHLGSGLYVCDEFGNPVHTHADRYRCAACGLVRTHSVDDFVLAVIRARLGRDDLADLLPTADDDEVDAIDDELAELRAKLARVQADYDEELIEARDLKRARNRYEPQIEKLETRRARLAGASALLDTTGYASPVDAFDNAELAVQRRVINTLCQVRLRRGVRGTKTFNPESVQIVWN

SEQ ID NO: 239 - protein, 521 aa, synthetic construct
MEGNYCAYLRKSRKDLEAEARGEGETLARHEHILLDLAHRMNISLEAIYKEVVSGETISARPVMQQLLREVEEGVWTGVLVVEIERLARGDTRDQGYVAEAFTYSDTKIITPLKTYDPADPSDQEYFEFNLFMSRREYKTINRRLETGRHQSFLEGKFLGNVAPYGWERYKLDRQKGFSLRPHPQEGKYLVMMYNLIAYGSDGTPLGPDQVASLLNNMGVPSRTGSGWTGATIRGIIENEHNIGLVRRGRRKTVKKMQNGNIVKLRPHQKSYELADGLHDGQVSEEVFRLANENIHSPAPPVNRDYTVKNPLAGLVICSCCGHAMRRRPTHVKAAYDFLYCPYGCETIGAPLYLVENAVLDMLKGWTEKYQLQRTAHDDRGSQELIQAKLLILSEKEDALEKLKKQRGSLYDLLEQGIYTTEVFLTRQKDLSEREKTLMEELSRLRDEIEYERKIESERMNFIPKCKKLVDNYEFLSVQEKNRFLKELIDRIVYTKTERNQRGRGSTANFTLEIYPRVPRS

SEQ ID NO: 240 - protein, 560 aa, synthetic construct
MGETQRALLAARISIDTDESTSITRQLEKLHTWAEGLGHAVAGVVEDRSVSGAVDLPERPSMGPWLTEEGREKWDVLAVATQDRLSRDDLHFMAFVKNVLDWGKTLVVLDDPSFDISTETGRLIAYAKATQAAGELRKIRQRVADARDYLRRNGLFAGGLTPFGYVYGDSEDGKHYVLVPEAEYAKLLQEISERVRSGVSTNQIARELNAKGVLTWRDYLRELRGKDPRRRNGKALTEPKGTNWSPQVVQRILKHPACAGFLAYKGEPYEDDQGNLVMATEYPILTNSEWQATVTAIKSRGVSDIRRTNQASLLTGVARCGTCGARMFCHRLKKTLATGEVKVYRHYSCAARSKGMPCANSARIPEDLLNEVFEEALLSRLGELPEVVKMTEPGEDHTAELEQVRARLLRLEKDYENGRYDDEDKEESYWRMHGNLTRKQKELKAKPVRPAVTRFVPTGLTWAQKWGGMRTEERRDYLTGRGVQVYVWKKAIPNVAHGVVVSLGDLKQLAQAAGLGAASVEGWQVTGWNVPAHWINPELRDFPGLTLEPVPEFLKELKAV

SEQ ID NO: 241 - protein, 554 aa, synthetic construct
MQDDFPGNQHSSGPVRAYSYVRMSTRKQLRGDSLRRQLERSKAFADEHSLLLDDSLQDLGVSAWRGRNFKTGALGRFLSMVESGEIPKGSYLLIESLDRLSREAVPDALMLFMAIINAGIIIATLGEDRQIYSRDRLNGDWTKLIIGLAVMSRGHEESQTKSERISAVAKRKREQAREGKGHITSITPAWIDAKWIGVNRYEFTLNQHAETVRVIYEMATRGLGATTIARKLNADGVPAFKSKDGWYQSIIKALLTRDDVIGIFQPHRMQNGKRVPDGDPIEGYFPAAIDKDLFLRVQAMRRTPGRPGRKGDTFANLFTGLCHCAHCGGPMTMKMSRVRGNENGRYLVCANYVRGHRCADGNRHFRYEPLEGAILDHVKELNLAETLHALRLDDGYRELDETIASLTLELEELRRKEWRLAQAIEDDSEPPDAILNLLKTRQTERQAIEAALRHQQAERQRRSIRQDSPTETCDRIGRLRDAWEKADDMTRYDLRSEAHASIREIITEISFDSGDCSTMLIVENGIVVHRFTDGRVPRRHQTWRAMPVTMRSAV

SEQ ID NO: 242 - protein, 613 aa, synthetic construct
MAVPTIVNYARVSSTKQLQGVGLETQLQREILEELSLEHGLHIHHEAYVDYGLSAYNGEHKTGDLGRLLSHIEEGKIASGSIIVIYSLDRLSRQEVNEAMSDLLYILNRGVRIYSQADDQLYCRRSSSMFIDLMKSLISMERAHEESRVKSQRVKDAMKVGLKQWYETGKPQSTLGRVPLWIDQPTNEFNDNAQGIQKAVDLLLEGKTPYGVKIYLDKHFPFKVVKKRKFENDKMWSIDTITALHTRVSLIGTKVVRVDEVSHELEGYYPPLIDQKTFFRLKQIRAKTSGRATKNDKIHVLKGLATCHHCGSKMVFVDKGRPEPTYICSNASKGNHPREAFNVRVLEYLSLEISKDIYLSEKASLELIDNSEVRVKEELESAHERLEDLTKLYREKKSLTIAELIVEAEEQIELLTSNKKDLKDEQFRVTSNYLKDDLYTDAVRKDFTEQSRAKHSEGLRNVLDRVILSRVEQVSQFTKTGSVSCIKICWLFKNGQKRELTVNPFEYVNDDESKEIYIPYRYKYDVPIDEFTRSSTLIHHCLKRLHEWNLLEKLYPSKGRYQWKERKLNLGQVSSAMTNMMPKGVDLGNCESIRRAFSVSGIQHTQIESNFRY

SEQ ID NO: 243 - protein, 595 aa, synthetic construct
MPLCFPYVRFSSQKQADGNSVVRQSERIESFVTRYSLTVDTRLEDHGISSFRGANAKKGQLSGFLQRVRDGEIPHGSYLLIENWDRLSRQVLDASIEIFSDLIRSGIKIAVLDEDTVYDDLTSNSFIRAIVQFERAHSESLRKSDMSKASWRAKHKAMAEGAIATEKCPQWLVVKDGAWCKRDDICLHIEAMFSLAQTYGMAETGRRLNAQFGTSYKTHQIQYLLRNRRLIGEHSPVELSKEHGKNVPTGQVVEDYYPQVIPPATFEEVQTILKSRKPFSGRQDATNLNIFRNLLVCAECGGSTRFMLKSGKEYYYCTASMTGGCVDDQIRSIRGEFLRRVLFKFEHWTAIRDYIAAGSDVLKALKKEETVAVAKLTRLEAKADGLMNKFAAEDDEDKAETYVSLLTETRKGIATANADIDRIKHELASLDGAFSLNDSNVDSFESMLTSDSEQARTDRQRLNRYLRGIFLNIELHFPTRKLVTQPIPALANRISPVVAYVQQPKDKRTGDDYGHHTWISKDQQALILKRIKARLRRAGIPSPTFQQVKPIYDDVVLSLLPKRKPRPQCKNQPKLVELPIELDGVVWKASDPFLK

SEQ ID NO: 244 - protein, 468 aa, synthetic construct
MKCVIYRRVSTDMQVEEGISLDMQRLRLEQYAKSQGWVVVNDYCDEGYSAKNTERPAFQKMIKDMKKRQFDIILVYRLDRFTRSVSDLHSILKTMDEHNVKFKSSTEIFDTTTATGRMFITLVATLAQWERETTAERVRDSMQKKAELGLRNGAKAPMGYNLNKGKLYINTTEAEIVKYIFEMYKTKGIISIVKSLNSRGVKTKQGKLFNYDAVRYIINNPIYIGKIRWGDDVLTDIAQEDFESFIDKNTWYTIQQVQSNRKIGKVRLQNFFVFSNVLRCSRCGKHFLGNKQVRAHNRIVMGYRCSSRHHKGMCDMPQIPEDVIEKEFLNLLEDIIIDLDDTVDQPVELSNLQEQHNRIQDKKSRLKFLFIEGDISQNEYKKEMLIITQEEITIQKQLATTEDTVSSIEIKELLNRLKDEWPHLNNESKKAAVNSFVSSISVEVVKPARAGKNPIAPVIEIKDLQWKY

SEQ ID NO: 245 - protein, 485 aa, synthetic construct
MDAVIYVRVSHDKKGQGRSVEEQESECREVCADNGWTVREPVVKDNSIGASRYSRAKSRPGFDSLPNILRRGDVLVVWASDRAGRKMEDHLVLRDMCEQLGVIFCAGGQVYDFSKTADRARAGHEAVDAEQESSRTRDRVVRAVKARANKGDAHGALPFGYVRTFDPVTGERNWHVDPVAAQLIRDAVETLLAGGSLYSIAELWNSRGMTTNYYVKEKTVNGVVVPAKHGQPWQGRTVRNLLKRPTLAGLRTYRGEIVGPGNWEPIITRDQHERVCAVMADPTRKGRHGRQAKHLLTNIATCSVCGAGIRYMRNTGAKDQYRCPVGHVGRSAEPVDAWVIEHMFRLIDIWRDQVFFFSDDDEADAADVSGSSLLWEQARALKQRLDALTDQAIAGTISAEQLARATAVLEPQIEAAKAKAQADTIHPLLFRLGESNNDLWKSWTIEERRSLVRAVVDITIHPAINGARKFDPATVKIVWKGQKKA

SEQ ID NO: 246 - protein, 545 aa, synthetic construct
MAKQYKVGIYCRLSVDDASNSAKAKGYIPSDESVSIENQYEILSKFVMLNGWIEVKTYQDDGYSGGNFQRPGFLEMLEDARHGLINLILVKDLSRLGRDFVEVGRYTDVIFPSLGCRFVSVLDCLDSEGDNTDMLHFRSLMNDYHLKDLSSKVKSVLHAKKKSGQYLAAYAPYGYRKSEEDRHKLVIDGESAAVVRQIFQMRQSGMAYGKIAAALNEKGILSPRWYWAVHYGNGSCKYSRLWAYATVRSLLNDDVYAGTLTQNCTGSRSYKDKTMIRKPESEWISHEGAHEAIIGPELWEAVQKINQAAKQISANNTPPQASLFTGKLVCADCGHPLVAARETQRRKNGTVKHYTSYFCSRFATTGHSICSWHRIFEISLKNLVLSEIRAHGKAVAADEAAVLDKLKQHIQSASAAQQEDSRQEISRLRRRLKELEQITAKLYEDKVRGAISGDSFSVLIQKNEQERIQKSERLDSLLAGERKAQQDIANIHQWAGTIRQYLDLQELNREIIEELIDRIEVGERTVIDGQRHQDIKIYYRFVGLV

SEQ ID NO: 247 - protein, 550 aa, synthetic construct
MNNLNRQPYDAAPEKITALYCRLSRDDELQGDSNSIKNQKAILKKYADDNGFTNTEFFVDDGVSGTTFDRPSFQRMIAEMDAGHIATIIVKDMSRLGRDYLKVGYYTEIAFPEAEVRFIAINNGVDSINQQDSDFTPFLNIINEWYAKDTSKKIKAVFKAKGESGKPLCTNPPYGYMKDPNDKNHWIVDEPAAEIVKRIFQLCIEGYGPSQIAKKLENDKVLTPSFYFKEIDLYPTALTTEEPYAWVPRTVADILDRQEYLGHTINFKTRKKSYKLKKTIKNDPSEWQIFKNTHEAIIDEDTFQTVKRIRDGRRRPTPLGEMPVLSGMVFCADCGSKLYQVRGKGWSHDKEYMVCANYRKRGKDTCTSHQIRNVDIENVLLYMIQQVTAFAREHEDEFVEMVTKSNAKAVEREIRESKKEYEQSQTRASKLDTIIQKLYEDNVEGKISDERFAKMLATYETEQSQLTHRLAELKHIIDAAKEKSNNVDSFLRLVKTYTDIKELNAEIIRTFIEKIYVYGNEKPWDRNTKKLKVIFNFIGEVDIPSNVKKA

SEQ ID NO: 248 - protein, 567 aa, synthetic construct
MTVHIYSYKRISSRTQKEGTGIDRQEALIDEYLAHHKLELTREFIDLGISGFRGKNARTGALREFLDLITSGAIKANDVLLVENFDRLTRMNGIDATKLVVDILSAKIIIVTLSDNQTYDYRQEDHSNILFKINFVLSRANEESRIKRNRSLGAWQKKHSEAKSLNKVMTKKLPYWISYNRETESLNLNPSRANEVKKIFKLLELYGCARTAIEINKTETDKKWTLIAIRHLSRAKSVFGCLEIYKTKTANGEGADYEELENYYPAVISKEQFYNIQTKLNVRAETHEKKGREAKGFRNVFKGVIFCEHCNTALHQHFTKRKDKEYMYLLCAKSLVGACPAGRKIFIPYNYILEPFLLYYKNYDLERIIRKTGDIQSIVESRNAYDTEIKDKQKTMDKMIESIESNGGDIPKIILSRIRSIETEIDELSNKRDLADIEVTRMNIYVEAEKAISRDDIDELLSSEEGRIRFNVLLKESQVEIRVLKRFDDSKPFEGQDFKDEHKMSEVIINNKTKGFGINYYFDRKHAILAGGYYYFYTKKYIGTWNSELTLPLGSRADFSSRDDDTQ

SEQ ID NO: 249 - protein, 545 aa, synthetic construct
MKRAKLNNDKITALYCRLSKDDGTNNESMSISTQKTMLKDYAKRNGFLNCQFYVDDGYSGTNYDRPAFRQLIEDIQDGEVSTLITKDLSRLGRNYLETGTYIEVFFPNHNVRYIAINDGVDSIDNAQMDITPFRNIINEMYAKDTSRKIKSALHARRMQGKYMATTAPFGYQKDEKDHNHLVIDEVTAPVVELIFSIAEEGVGLHTICNRLRKAKVIKPSFYKKEMFERYTDEEKMYDWDTAYVSKILRNPVYAGNLTVAERPTKTMRSKKRQYIPYAEREIIYGTHEPIIEQNRWNTVQKILDGRPPVIGESSSGYDNIFRGIIKCADCGSAMLAKVEQKRKRNNVLDKTFYCCTKYRKFGKEGCSSHTIEARTVHEVVLADIQKHAGQALTDRKAMVTEIAERLNLQMSADREQQKRELRQCKQRVSEIENLYAKLYEDLTRELLTEKRFQMLSARYDSEQEELTAKIKELEKSAIADREQLSSIEQFAEQISGYAGITELNFKIINQLIEKILVSEPVEVDGQKIQRLTIHYKFIGALETLE

SEQ ID NO: 250 - protein, 547 aa, synthetic construct
MKIAIYSRKSKFTGKGESIENQIQMCKDYVNNNMKDRDITEFLVYEDEGFSGGNTNRPEFQRLMEDARAKKFEVLICYRLDRISRNVADFSTTLETLQKYDIDFISIKEQFDTSTPMGRAMIYIASVFAQLERETIAERVKDNMLELSKTGRWLGGVTPIGYESTPIIYYDHDMNEKKMFKLSQVPEELKVVKLIFDKYLEFKSLSKVETYLLQNDIKTKKGNDFNKSNLRVVLTNAVYVKATEDVMNYLEQEGMTTCGVPDGNHGLLSYNKSKTIINENGKITRKHRDKSDWIVSVSSQAGIIEDKEWLEVQRILLKNRDTFPNLGRTHNALLTGKLKCKKCDGLMGISHGHISKKTGDRIFYYACNLKKFSKGSRCDCKNAKVAEVDAAMKLQLKEFGLNQAKLLNKLSEQLKKAKENNSGANQEDNIKKAIVEKERQIESLLNKLSLDDDITELIVGKIKNLKTELSELKSQLSNINDMKNEQIENELNMSLIKMILDKCSIIDTLKDGEIKQLIDVFIEDIYWDDETSSIEVNIIGSKGSKKK

SEQ ID NO: 251 - protein, 478 aa, synthetic construct
MTKRKATAAIYVRISRDADGRAAGVERQEADCRALAERMGLTLHPRVFKDNDIGASSRSRKARPAFRELLEAVEAGEVNVILAYSNSRITRRPLEWESLIRLSETHGLQVHTVVSSSAQFDTADGRMVLRVLAANDAAEADRISERVTRAKQQRLEEGAFRGGPRPFGYEADGMTIRETEAQALREAAGRIVAGESLRSVTADLRDRGFKGTRRADSGLQPVQLRRILLRPRNAGLVEHYGKVTGPAAWPAILSEDEWQAVRSVLTDPARKTNHGSNRVKHLGSSLFRCGVCGDHVRASAASRGYRVYRCKTGAHVSRAQEPIDHFIREVMAARLRADPDVLRREDDVDDAAPNEIRRELSTLRARRAQLADDYADGLLDGAQVKAAGARIDAKIEAAAAELARLTSASVLSGLADAEDAGNAFLAAPIGAQRAIVDALATITIYPAGKKGRPAGWQTGDHYIDLETVQITWKGSDDE

SEQ ID NO: 252 - protein, 466 aa, synthetic construct
MIGIYIRVSTIEQVKEGYSISAQRERLTAFCKAQGWSNYKFYVDEGISGRSTNRPELEKLINDVQQDKIRMILVYKLDRFTRSVLDLHKMLEVLDKHGCTFKSATEPYDTSTAMGRMFITIVAAMAQWEVENSSERIKMALEEKVSKGERVGNVPYGFDLNEEEKLVANEKANIVLDMIDKLKSGWSAMRIADYLTNTNDDKGKWLANTVLRILRNPALYGSTRWNDRIYENTHEGLISKEEYLKIQQILEDRTHTRLRNVKNTYVFQNKIVCPECGKIMSVNRFIRKRADGSNYEGAVYRCQPCAKSKKFTKSPSDQVLRKALYEYMENVTFEQFKLPEQKENPHIEELKKVEKKREKFQRAWANDLMTDGEFKKLMNETKEIYDDLKAKTQENNQEYIINPEEIKDIVISFNDGFKYLDDEHKREFISRFIRKIEIEIIETPPKRKDRSLRGQYKTVISNIVFM

SEQ ID NO: 253 - protein, 401 aa, synthetic construct
MVGAEFGKIMQRIGGRLIVTDGEKATTYDFRRQRDRDSWHGAVGKSVSDSGLKSELVKRKLDAKREALEFLGGPVGFGWSQTITRSGKKIVTVWSVDEEQARWLREAARRIREGEAVLKVSDDFYDRGLRIPHRRTHPGDTMKSGSLTRASLSAMLRNPRIAGLFATGNVHTGWTVKGPMANFPAILTEEEWRETCAALEAVTTRKGTGTAVKHTFAGYYVCHKCRRSLVRNSPRAYALWRHRLGKSREHFECDQSFHINAADADDLMTRLVDAYLRRRDWEKTGDVADGDELKAERTEKERELADLPRAIAAKEISLRLGGQLEAQYETRLREIDAELARRARLVTVLDGAEALRLWRGGTLTEKRRVLSTIMVKIIVVPGKDLPLRERLDPQWRYPGPA

SEQ ID NO: 254 - protein, 537 aa, synthetic construct
MRESNTEQITALYCRLSQEDLRAGESLSIENQRLMLKEYADKNGFRNCQYYVDDGYSGTDNTRPEYVHMLSDVENGLVGTVIVKDQSRLGRDHLETDRLMELVFPAYDVRFIAVTDNVDSANGFNEMSGIKNLFNDMYARDCSKKIRAVQRAKGERGERVGTTTPYGYMKDENKHLMPNPETAPVVKRIFEMSAEGKGVRKICDILTADKVLTPSAYAARKSGKQKTSSPYRWSLKTVREMLKNRIYCGDTVNFSTYTKSYKLKKTLKNEPENMLIFEDTHEAIISRKLFDVVQKHYEGRKKSDKYGETDKYAGFLYCAECGSKLYLHRARTLDPKKNNYMCGGYQSRVTDCTAHYIREKVLDSIVLRYLRQVVGYARDKSDEFYAMAMANGEVEAQKQFKENEKLRSEYESKISQLDNAIQLLFMDRSNGKITDERYDILSANFEKEQSEIKAKLSTLDSQMDKMKVREKCVRDFINNAKQYTEIHMLTPEILKTFIWRIEVYEKAVKHSRTCGNHIVIYFTFMPDKAIAIDRMIS

SEQ ID NO: 255 - protein, 533 aa, synthetic construct
MYRELPTFCPEEILVYLRKSRADDPSLSVDEVLARHEELLRDWIERNLVHAIPEENYFREVVSGENIKDRPEFQRVLRKIESPKIAAILVVEVQRLSRGDLEDAGRLIKLLRYTHTMVITPQKVYDLEDEYDRDLFERELKRGNDYLEYTKRILNRGRILSVQNGNYIGNTPPYGFDKCWSIDGKKRVPTLKENEKADIVRTIFRMVDSENMSPYAVAKYLDSIGEPAPSGKHWTYNSVLGILRNQHYDKKVIWGHRSTQQVVIDGHIQSTRPRQKEYLVAEGRQPRVIDHEVFERVQKAISGQPRTRRDLNPVNPFAGIVYCANCGRSLSFRFYRRAGRGETCPPRMLCSDQIHCKSSSCYFYEFSEAVQKVLQKHIHDFSIQLDNLLQEPESYAQDNIRLLENRLNELKQKELRQWEKYADGEMPKEIFDQLNERIQKNKQAAQIALDAAREAAPDTADEIQDKITRLSDALRALQDDTIPVSLKNQYLKAVIERIDYSRPASIRALQGTTDRRHGGWSTPPFELQVHMRF

SEQ ID NO: 256 - protein, 591 aa, synthetic construct
MEQGRKTKLYSYIRWSSDRQAKGTTLKRQTAKARQYANTNGLEYVEILDAGVSAFRGKNTSPESALGGFIEAVKNGAIPSNSVLYVESLDRLSRRTVRAASRLFDSLLELGLTIVTGMDGKVYTAKDVDENFPDFLMSLFLFSRANEESQTKSKRVKANAAALVKRHNSGLPTTIKSAGSHVFWVDASGHHTEAVKPDPIYWQAARKIIEFYLSGYTTHKICDYLDEHYPPPPVKLNRRSVVGAVRRWSYQLVRRMKTSEALIGNRTLVLDKNTKPPTTTTLEGYYPALCTPDEYGRLIDMAKNNRISQGKHKRRITLLSGMGIARCGHCGGAMTFFVSLGTIRYLCANGKDRVSDCKAWSVRGDIFEHTAIHALVRGYASMMSREKKWVEDLHSEIERKEGELTAVNKQLVQLGETILLVGNTETLINLMIRAEANKRELTTEVKQLRHRQIVADSKEGDIDHLSDFIGLLSNDLLEDVTHPHRANIREAIRAVISSARVTKRQNNSLSIVFDIHDGTRHTFEGGEERNTYIEFVQDLDTDGNPITYPDTEEVREAISKRQELESRLFAAVSASLEAMPPIDPSRFWSKR

SEQ ID NO: 257 - protein, 470 aa, synthetic construct
MKGESELDKKAAIYIRVSTQEQATEGYSIQAQTDRLTKYVEAKDFILYKKYIDAGYSASKLERPAMQELIQDVQSKKVDVVIVYKLDRLSRSQKDTMYLIEDIFRPNDVELISMQESFDTSTAFGSATVGMLSVFAQLERKSISERMITGRVERAKKGFYHTGGQDRPPAGYQFNSDNHLIINEYEAAAIKDLFRLYNDGLGKSSISEYLKKNYPGKNKWLPSSIDRMLKNSLYIGKVKFSGVEYDGIHEPIIDEVTFYKTQKEIARRKQSNTKRYNYVALLGGLCECGICGAKMANRRAVGRKGKVYRYYRCYSKKGSPKHMMKTDGCSSKAQQQFIIDEAVINNLKNIDVEAELKRRSAPQTNTSLISSQIESIDKQINKLIDLFQVDSMPLDVISEKIDKLNKEKQSMEKLLERKNRLDKTELQHRFDILKSFDWDNSSIESKRAVIEMLVQKVIIHDNSIEIILVE

SEQ ID NO: 258 - protein, 563 aa, synthetic construct
MMSTIKAYSYLRFSTTRQVRGDSARRQLELARDYAKRKGLELQELALADMGVSAFKGANRDAALGVFLRLVQDGKIPKGAYLLVESHDRLSRQNVEDALMQFMEIIRAGIVVVTLTDEIEYRQGQLDMSKLMLSLVYMSRANEESEMKSRRAKAVWEQSRKAAVESKTLIRNAYLPQWLKWEGDRVAIIPERAAIVQRMFALAMQGYGYTRIAAILNSEGHTGFRKNNPWRPSGVGSLLRNRRVIGEYQNFTKVDGQRQPIGEPIPEYYPAIVSISDFQEVQLQIATRNKHSGSARRGRFDNLFSGILRCQCGASMVYNDKGKKGAPRYYLVCPMREANNCDMPMLRYDAFEPQALVAISHLKPVMDARSAKSTQLWQLQNDIAKLTDQVNAQKARKRRALTLALESDDPMYNESLSNIHNDLCLMESQLDELTVLQKQLLTANRSIQLLKATEMLTMESRQLFNTQLHQSLNTMQLVLHRDFIAVAYYSKELDERPLLEQAFTVGLASSEVMEADGEMVCRTIKSPPYIDTSWFSELEMKPSESYEAIDDPEGFCVQELYDS

SEQ ID NO: 259 - protein, 585 aa, synthetic construct
MLAIYTRLSVESESKSIDYQKREGIQFAKEMSLQYELYDEGAGVSGTNDITERPVLSKLISDISDTSKNISAVWMRSQDRLDRNSMVYFIFLDAVKKSNVLVYFGSKEQLDFNDPQTLLNTSILSAFNAYYAGASRKKIKRVLHDNAEKGKVWGIVPYGYRTDENQKLEIYEEESKVVELIFKLALKGWGGKRIATKLNLDKIPTRYHNYEGTLKTKNKYTKEVSRKSKKDIVWAAKTVTDMLQNKWYVGTRTYGEKTFACPIIINDIDFYKVQNLFKKRKNFRSFEGKHKYLLKGKLRCKCGRNLYGRYKKHGRENYYMCSSKREATMNCGSASINIPRLDSFIIQHLFESKNLINHLEEVLNNSDKLKTLNYELSEIISKISILSRKKNKYAKYLADELEGDETILDLYKKTKRELEIGIDTQMKIQAKIDDLSSKKGLNNYKEIKKKIKSNDLMNDFESLQEAIHQILDEIVIDSTIREDKSVFLKLSISYKNIDLEDKEKVLWVAERMNGKSIEKFEFIGKVNQVDDINDSIFNYLKQMSSMNENLVSHLKKEGLSNRYINKQKKFQTIYVDKKSLFHFNK

SEQ ID NO: 260 - protein, 629 aa, synthetic construct
MKKCFIYHRVSSDLQLSGTGIERQEQNLNAYVERINLLAEMDDPEATIISDQGVSAFKGLNMSEGELGRWMDQVRAGMWDDSHLVLESIDRFSRQNPFQVVGYLAELDRHNITIHDVSLNMLINRGNSAMLPIVAMSAQRAYEESKIKSDRIRDGWRRKREQAFKQGTIVTNKRPQWIDIVEDKYELNDKVAIVREIFRLYQTGIGTPTIAKMLNERGSEWLFESGRLWRGESIHKLLRNKRVTGSIFISEIIRDYSSTSNPVDQKRYEMDVYPIAISKEEFNLVQELLKSRRPGAKVTGGKVLKKFYDPITNKPYLDRDGNVIELEVDTGKEIIQSNIFNGICRCARCGEAMYHNVVVAKRDSKKKGKFTEEYRYIRCIAERDGLCDNKALQYEVVEQFVIEHIKNLDFTQILKPNEINPEIELVRLKIEEEEAHIEDYKLNIERIRNTGKKIPFAVLVELEESEDRLKELKERQTTFTEVQVDTDYLKMVDPSVLFDVKNIEVRARMSAELSKILDSIQLYRTGKHYVITINYKKVEVLKHVLFVEAKKEPVLVSGVAIERFGDTVAYCTPSFSIVVEGVTSPRLINIEGEPLSIIDYSLLLNYVDAVDPNDAVGVWMRNQFNTLTA

SEQ ID NO: 261 - protein, 583 aa, synthetic construct
MKKLYSYIRWSSQKQTVGTSLARQTEAARNYATENGLEYAEIRDAGISAFKGKNITHGALGSFIQAVKDGVIEKDSTIFIENLDRLTRSGVGTAQKLLLDLLDLGLTVVTGMDQRVYTMESANENPTDMLISLLMFSRANEESKTKQNRTNNTARALVARFKQGQPTNIKNMSNDPWWFDSSGSKYEAVKPHPVHWVAAQKAVELFLMGWGCFRVTAYLNSHLDLYPAPKPTKRQIDQGVKKWAVPNLVTMRKNPALMGVKKLTIEGYEHKLDGYYPALVTPEQFARIQDIRTGNKFVQGEQKKMISLLSGLGVLKCGLCGGPMIAYSREGRLRYVCSNGKIQKSSCKVWSVNGSIVENLTARALVYGYTHSILLGNTKTEDLTPLIESKETELGLVKKQLTNQAQAISTIGPIQELIEQVAVLSQREQSLLLELDSLKQKLALQGSENELDELIIKTLSLFSDELLGDVTHTDRMQIREVVRKCLPEITISKLKDKALRIDFRFHDYSHMTFQGVMQGKEKSYTLTRTPHDQLYTKIAAVFSDVLETSLDATDIDGYMAASDRMVAALGLPEPLGRDFFSKR

SEQ ID NO: 262 - protein, 444 aa, synthetic construct
MKVGLYLRVSTERQIENYSIPLQKERMHAFCASKGWQEIKEYVDAGFSGSSLERPALKQLQQDIKRKRINMVMVYRLDRLSRSQQDTLYLIEDVFVPCGVEFISLSETIDTTTPFGRAMIGVLSVFAQLERETIVERFWSCHQKMVRDEGLWAGSACNIPYGYIRLPRGELMVNEKERQHVVRIFEEYVNLQSYAKVHQKLEAEGFPKIKNNRMRRLLENKLYMGDVSFSGEWFKGSHEPLVSAELFNAAQEVIQNNRWNSHGKAKNKVFTGKVFCGSCESEYRPYVNKKKHYLMCHRRKCFSQYESKCFNRTLLREHFEKEVFSRIQNLGTSGEISLENKGNEYTKQIKQIDNKINKLLDLYMDDRVSKNALDTKLNQLYTLKNERLEQLEELDDQQLEIQDFIKKGVENLSECDLPTRTHIVDLLIDKIVVTDETLQIVWKE

SEQ ID NO: 263 - protein, 487 aa, synthetic construct
MTVAAAYLRVSKSDDTDDESLTLETQRRRIKALCEARGWMYGPEYIDEGVSATKGRGGNTDWARLLGDVGKGKFDVIVARDLDRLLRTLQDLVKLIDLGAKVATVDGEIDLTTADGEFRATMLAAVARFEIRRKSERAIGANETRRRKGLPVTRVKILGYDEDGVTQIDDEAEAVKKAFVDYLAGVTLAQVCRDLNAKGFTSSRGVPWGNANIRSLLTNARYKGVITKWEPDPDRRKISGPLTEETYRGTWEPIVSADVFDAVQAKLRDPSRRRNWGTEPRHLMSGLLLCGACGDGTHMYHSTFYPKARMKKSGEVTKADPVRIYKCLKGNHLSRKAQPIDDLVERIVLRRLQEPDAANMFTLGDDGLAREELRVERVALQTRYEALAGLVADGVLPADQVRQEAPRLIGRINEIDALLSPGPQSVGQVLVEADDIHATWASLDMQHKRVVIRKILTLTVLPGRRSKKVEHLPRQVDDPDIKIEMLM

SEQ ID NO: 264 - protein, 541 aa, synthetic construct
MDALLYIRWSSQEQNKGDSHRRQLRLGEDAAKLRGWNIVETLIEDGRSAYHGRNRDVGGKLAEIEDRARLGNLNGWVLLVEQLDRLSRQQPIQTLNLITSLTGAGITIFETSTGRKWDNDSVRSSWTDLLEAFIRAGLAFDESDKKSKRIKSAWMATRERGATKDGQADPRIMPGWMEVVEGRYKIIEARAQWIRSIFRWCIEGVSLTGIARRLNADSKSRWTAGSWAAPNISQLIRARNVLGEYLPQTKDQTGKRVPAGDWTKCYPAIIDEPTWQAAQAALQRRASASPSARNRRINILAGMVICGACFGPLFLGTHNKSARRLICRNRHQNSGCDARTTYHYPNLERGVLDYVLHIAVPEQTGPGSSAGLITNLELSLQERKARLEKLVDSYSRTGSAAMERGILSLEREILVGEDDLARLRRQEREAANRPAPTELLKRASELRGKMIDDDSRSHMNQLLRSLVTSIVMNPANMEATVILLGGLAAIRLDKHGNKIAGADAKAMLLDPEGRAQTIAATIGSDVPHRMMLDQWEARADV

SEQ ID NO: 265 - protein, 461 aa, synthetic construct
MKKAALYIRVSTDEQAKHGFSLGEQRHDLEQYAAAHHYAVVDVYADEGNTARKAISKRKELQRLLDDVRAGHIDVILLKCLDRWFRNVRDYYKVQEVLDEYGVEWECTQEDYNTTTTNGRLMLNLKLSIAQNESDQTSDRIKYINEGKKRRKEECTGKHPFAYKSVNKKLVIIEEERPIVEFAFAQLLAGSSTHSIATKIWQEFHFAIDARRIWRIVRNPTYKGERYGIPDFCPAIIPPEEFDKVQKILSRNNQPSRTGLVYLFNGKIICPSCGSILVVNCGRSKKTGKYSRPIYLCGKKYTTGKPTIAGGCQFGGGVSERVIERWLIANIFPLLKDYEAHLRSSQPKSMDYRSKMKTINNKLARLKDLYLDELIDKDTYKADYRKLQDELAKLAIASKKQVRLPPAMDSILSDTDFEKTYSEMPREQQRELWQSVIKRIRIDRRPEDKGKRYTDFQVEFM

SEQ ID NO: 266 - protein, 502 aa, synthetic construct
MIAIYARQSVDKKDSISIESQIEFCKKEFEEGQAYKTYIDKGFSGKDTNRPAFENMMNDIRAGQIEKVIVYKLDRISRSTLDFANIINTFKKYNVEFISSTEKFDTSTPIGKAMLNIIMVFAELERETIQKRIKDNYYARGKKGFFLGGRVPFGFNKVETKVDGKKTSMFEPNPEQIPYVIEMYEMYANTNTSLGKISDYLNEKNVPAPNGGNWDSNKVSRILHNPVYVRADADVYQYYKNKGCIISNDISDFIGTNGCYLFGKREANERKYTKVENHVLALALHEGIIDSHTWLLCQYKLDSNKQIKNSGKGKHTWLTGVAKCGYCKYAVSVIKSSTGNYKYFNCRGKTNLKVCKGHSRPILVDEIENIVKEHIFEKINQLRNTSIDTQVEEDRNINRIKIQLIELDKQIENLINKIAEANEVTMKYINERLAKLDKEKTALLEELQKLTIENSKVISMNEIFEKVDNWENLSLEEKKEVCSNLINKVYIKDDEINIEWKI

SEQ ID NO: 267 - protein, 554 aa, synthetic construct
MNNHRKIAACYMRYSSHAQDDGNSIEAQDKAIKRYAEEHNYDLQYIYCDKAKTGKSAKRPEFQKMIADAKNQLFDVCIVHKFDRFSRSRRDSIIYKEILSEYGVCLVSVSEQFGSGPQSTVMEAISETMAEYYIKNLSNEVRKGLDVVASKGLHTGGIPPLGYDVSEDKKLVINEAEAEIVRLIFDRYANNYTYNDIAKELNAKGFKTKIGNEFTGSSFNAILQQRKYIGEYVYNRRVSEDKRGCVNSHKNKPEEEILRIPGAVPQIIDNETFEKVQKRLEMNKRKAGHYKSKSSYLLSGLIVCGVCGFHYQGNCRPSGSSSNMYSSYRCGKRQNHKVGCGNSEIEKNRLETFVLEQMQKHLFSDKAIKAIVTQVNEYNASVSKNKNKDLLLYEKQLKEVDKKIKNLSNAIANGVNQDLIIEQINSLGSAKKDLEQRINDSKAPEFPPVVEADVKKALSQFPTFLKENNSIECKNFINQYIDKIVVNKETVEVTFKVASAVFNSSFPDDKTGMIKIKIEISRFELKALPKQRRKIPTNGNFGKSFLKGYEIVQT

SEQ ID NO: 268 - protein, 561 aa, synthetic construct
MATVCYPYVRFSTGKQADGDSVRRQSEKIEAFIKAHGFDVDTRYEDHAVSSFRGKNATKGQLSIFLQKVRDGEIAKGSVLLIENWDRLSRQVVDASIDLFSDIIRAGMKIAVLDESCIYEDLTSTNYIRAIVQFERAHKESERKSDFSKNNWKGLHQKMASGEVVTKKCPSWLRVEDGKFVEIPEMTSLIRDLFEYSLSFGLSEACRKLNEKHGSSLKLHQAQYFLKNRRLTGEHMPVTYCSIKKKNVKTGQVIPDYYPQIISPSVFENVAEVIKGRRPFAGRQDKQYFNILRDLVVCSECGGSVRYMHKGAKQYYYCTASMSDQCVTEGIRSIRGEELRQVLFYHKQWTNITSYLSKSNKQFKDHRDSIAELRRKLALVSKKTSDLEEKWSAEEDQASSDTILHLLTVKREEQKAIKSQIELVEQQIRTMESAFSLGSETDGKDFVSILNAKTEEAAAERGKLNNYLKSIFEKIIIDFKSATLTTVVRPAFEGIVTPVTASIPVPADKRFTKGQAEGEFKRIGGGVTKRNPDKKPKLLEIPAELEGVVWKSERFVKPSAQ

SEQ ID NO: 269 - protein, 520 aa, synthetic construct
MSNLVMYLRLSLEDDVNADESNSITNQRRIIRDYISSHEDLRSMTVTEKCDDGYSGTNMNRPGMQELLAMVKEQRVDCIIVKDMSRFARNYLETGKYIEQIFPFMGIRFIAINDNYDSKDYVGGIGEIDVQFKALLYDFYSKDLSQKVSTAVMARKDKGMFIGICAPFGYLKSKNNACELLVDEEAAAVVKSIFTLRAGGASIAGIVRTLNGEGIDTPAAYHRRKGTYANMYTKGDSPLWTDYKVNSILNNEMYIGTFVYGKSRVKEIGSRRKKMLPPSEWKRIPNHHEAIVSKEVYEKVQAMKGTVPEAFTPVGKKASVYTGRLVCNCCGRNMIYHKDRLGKRFFNCEVNYRKNNNCVHRVLVTDLDGIIKGELSKQISGLAKLKLLMEKEREQHNERIRGAKQRLAMAEDTHRRLELELRTAYESYAKGVTDRETYLMQKQSYEAMIDGIREKIEAQKEAIFTLENQMPSENSGIQFLEGKSEIAEITDELLDVLLDKVVVYADKTIELRWKFSNRSN

SEQ ID NO: 270 - protein, 681 aa, synthetic construct
MVASTQVRRSKNPPPSTENVERETTAPVSGNPPVPSTHPQANSSASAQAARSAQGPLPNKTVKADGVAGLALGAEGNSPVPTPEVKRHPAVSTLVTSGAGNRRSPVGNVESNATAGAVFAEPLRGVRCIRLSVRTDETTSPERQREADDIAAAALGIDFGEGDALREAVDLDVSASKIGPFDRPQLGGWLTRPDAFDALVFWRFDRAIRSMGDMHELAKWAREHRKMIVFAEGIGGGRLVFDFRNPMDPMSELMMLMLAFAAQVESQSISDRVTGAQAAMRKMALRWRGGGRPPYGYLPAPMPKEHGGIGWTLVPDPDAVRVIERIIAALLEGKSPHAIALMLNADWVLSPSEHWKAYKARTKSTTDADSEADAPKKKPVQWRSQHIVTMLTSPALLGWKMHKGKPVRDDQGNPVMATETPIVTREEFDQISALLAPKPTAEKAPTRKDSVALLLRVIHCTGCGSRMYLNKSSGAYGCSSYKYGTYCPAPVTIRGTWVDEYVTAEFLRLVGPVQFTRVTEIPGYDPQPEIDATVAEMEEHDAQKDRRQSQAGMAAWQRRADALDARLTELESREKTEPRREIVPTGRTFADEWHTADTAGKRAMLIEAGARLDVKRGTKGGWRTLDLRRVEFAITGDLDPCIEEAAATADHLAAESNPDHAPTPGASAHRNLNPGVLTTAA

SEQ ID NO: 271 - protein, 473 aa, synthetic construct
MSRTALYLRISRDSDKLGRGVARQRAECEALASRIGLNITQVFEDNDISASGYSKRVRPAFEEMLKRTEGGEFDTLLAWDLDRLIRKPEDGERLIDLNAKSGANIRTVSESVDLTTANGKLFLRIKVDVAAHESEHKADRIKAAHRQRLQEGKPISGRTPFGWKKGGLELEPAEADAIRDGVAHVLAGGSTTSLMRQWNAAGLLGPSGKLWSTASVKNVLRRWRNAGVVEHKGQPLDVESQITAIVSREDLDAIRLKLALQPSPNGRPVAKSWLSGVMTCGVCGLKMYPRKDYYQCQTQTERKREAGDTRKHCSIAKHVAEDRIMHALYFEANHRARWGTVEAADVAKVRKIEDDLLEAQKDRQETTQLLFIKGVDRKGVEARLSELADEIERLERERLENRTATSEAARIADLMGGVQGTGVEFTVAWIEYFKTLTVEEKRDLAKTLTIEVAKGGKGAKRILIKGEVEHFTL

SEQ ID NO: 272 - protein, 539 aa, synthetic construct
MNTKTILRCAIYTRKSSEEGLDQDFNSLHAQREACEAYIASQKHEGWHIVKTHYDDGGFSGGNIERPALKQLLEDIDAGKVNAVVVYKVDRLTRSLTDFAKIIERFDNHNVSFVSVTQQFNTTSSMGRLTLNVLLSFAQFEREVTSERIRDKIAASKKKGMWMGGFVPLGYDLKDRKLLVNAKEAQTIKHIYRRYLELGCVRLLKEDLDKNGIYSKVRGEKGGCSFARGMLYKILSNPIYIGQIRHKGICHPGQHKAIIDQALWEKVQQHIAEKSVEHKTHNTVSCPLTNKLFDVSGERLIPVHANKKGRRYRYYISQSLAAEPKNASSSGWRLPGQEIEQVIAHAASEILLDGCAITTALQEAGIAAHHIPSALNKAKKIQQNTADLIDRFIRRVDLRQDGVCLTLSLASLLVPEVEDLTIIRDIPMRMKRRGIEMRLIINGTGPVRVDQPLLKTIVRAHKWFNDLVSGRVHNMAEIASMEGVDKSYVSRVVNLAFLAPDIIESIISGHQPADLNVEKLMKRTDLPLDWVQQRQLLTR

SEQ ID NO: 273 - protein, 512 aa, synthetic construct
MRVLGVVRVSTKEQATDAHYSFAAQRTRIRAYCHDRHWDLVDIVEYVQSGGSNRRELREILARVQRDQIQCIVVNELDRLTRDMVSTMLFLEELQRVGCRFASVSDDLDLTTPDGELKMMMLAMFAHYFRRQLSRKVKGGQAERAKQGKRHGERPFGYRPHGDSWVPDPQEAPVVQQIFQWYLQDQLGFRAIAQRLNAAGIPGQRGRTGTWDVRTVERLLRREAYVGDTIYGRWIQETDREGHTHVRRQTPQIIRDTHPAIIDRETWNRAQDRLRIRQSLGRRTHDSPYLFSGLVRCGACGASMVVVRTGRRQPDGRRAPVYCCRAYHTKGQCSTATKIPVADLDAAVLGALREEFRQVQTAPTPEQVARWLGDDPVMAQAQAARHRAAQRLAAIPAMLARAEEMALAGAYTIDEYKQAKARLLAEQAECEAVLHAPWPQLDDPQRLAARVAALIPQLEAALTADVTTARPWIQSVVERIVCHPGRHITVTWRSAGEEVCPVAVGAAQRPSE

SEQ ID NO: 274 - protein, 554 aa, synthetic construct
MSRAFLPLQVVKVAIYARVSTEEQAEHGFSIEAQLAELGVKCKEEQKVIYGEYVDAGISGKSMDKRPALQNMLEDIKNGKLQEVWVWKTDRLSRKLADLMQIMEFFNRHNVTFRSISEKDFDLSTSSGKAMMQMMGVMAEFQRNIIVENVKMGMKQRARNGKWNGGQVLGYDVVEVSVPKGKDSALQINPIEAELVRKIFHMYAGGRGLRSIANELNHNGYKTKPNKSFSAVSIKTIINNPIYIGKIRYNVRENWSEQRRKGINHDPIIVDGEHERIISQDVWETVQKLYAKKSVTSPRVFNGTYLLTGMMRCPDCGATLVAHRIHDTLKDGTKVVRRYYICSNFRAKGSRVCTSNSVKADMAEQYVTDRIAAVVRKPKILEDIVARINNNRTVNVVPLQKELASVDKELGTLDAQKKKYFKLYEADVVDNEFLIQRMNELKQQHEALTRRRHEASRQLERSSAEPVPLHQVKQVLSQFHELLSSAPIETQKNLLQIIVKQIHVKKGQKIEGIELEFDDKINACFLGYAPSTQTVAGAFAFSKQKSNASYTIVI

SEQ ID NO: 275 - protein, 602 aa, synthetic construct
MRLSKYTDASTSPEVQTEFIYEGSRAIGGEVVGWANDTDISALKTTPWEREQLRHWLDRPAEWDALIWQRMDRAVRSMADMADLGRYAKKHGKRLIFASGPGGGRLELDFSSPMSELIMLILAFAAQLEGQTIMERNRGAAAHLQALGRWAGGIIPYGTIPVRKTFSDGNEGWWLGRDVDLTWNYVTEMVDKALAGRGYSYIRDHLNEQRIITPKNHRARLATPPRKHDPESRWSDTTVRDILRSQVLRGYQTREDGSVVRDAEGNPVRAGEALVEDDVWFALQSKLDELSQTKSQATKRKDGHPLLGVLKCDECGANAYHFANVSSQKMRRYGTAFVTQIRSSALSFVTDDDAETMVIRVPGNADALADQVFKDAKLRDRVVVAYGADALALPVGKMSYAVLVALWDALQLGPGLEHVQKPRKRHLFHCQGKVHAPGVKSPSIDFNDTLRWVDEEFMRRLGRLRRTEVITTGGVDNRAAIKELESDIAALVEQLAKLRGAAADMVGRQLNGLSDKLEELSKVPFIPPQRQTVRLDRTWGDDWVAASRETRLDMLRSAGVEVFMRCATHRGQPVGERLRMEIGKHVTPEQDALDDVVYQESF

SEQ ID NO: 276 - protein, 566 aa, synthetic construct
MHRSTPVYAYIRMSTVEQAKGDSERRQLGQIERFLQENDGELVEPVFLDRLSSFNGKNIKKGAIKDFLERVKNGQIEKGSVLVIESFDRISRQGGYLAHAVILDIIKNGVDIATLSPYKRYSINSENQFIEGIEIQTLLYRAHEESRTKSDRITRQHQARREKAKDKSVVYGSLPFWLIRTKDWIEFKEPEASDVKTCLSLLKTYGMYTATAKINEQRKSSKIFSKETVSHLLNRSAVCGDLQTHRIEYDEHGNKIRVQGEVIHDYYPALISRSEFEELRAEIQNRRTTKSTGRVSGFKNIFRNAMTCGCCFSPMRLAHMKWKNGGKKYLVCTKSETNQCIEKGRLWFDYDDVERVFFNEVNLSILKKSLTQKTKVDDAEIERLRSNFLKIEKQKSNILNAIEMGTVTKTLVNRLGELEKDSDETQKRIDELKAENALKRSQNEAEIFDYEQLDAALKDEEQRAIINKILRTNQAEISISKGGDGCDFVIEISINDKLETEISYHKQDDFIDRVEHQLPHNQTTDLVVHEDHTDPYAEENDGQVFRMFDSASMPIIEINQHKKTTD

SEQ ID NO: 277 - protein, 551 aa, synthetic construct
MAQAFSYVRFSNAQQAFGDSYKRQTDKAQRYAQAHGLTLATAAEHQFFDQGKSAYKAKHLDDEGQLRRFLSLVEDGSIPSGSFLLIESLDRLSREKVRDALPRFLDLLQRGIKIVTLSDNRVYDQDYNDIDLIVSIISMSRAHEESAMKSQRLRAVWDSKHKAAISSKKPIGGNCPAWLEYKDGAYEIIEEKAEIVRRIYSLCIEGYGYTNIIKLLNQEGIPLLDDSNRNKAGAWGVSGIWRILSNKATIGTFLFKGDEIPNYFPTVIDEGTFYEARAAIEQRKRTASSNPGKGMNVWQKIAYCASCKAPMHYVKKRENNEYLRCSAYAKGNCTQQPISTKSTELVFKELLPKLDSLSLVQTNTNALTKELTINRGKQGEIKARIEAIQAQMMDISTTLPPTVLKMLTALDTELQTYAQREDEIVNSLSMEKLIDKNEFFKRLDLVSFAGRSKANSLLKSLNIKVFMSRNKMFVQYDVERDTSPILSVFEHKGELIWWGKDDITKGVADAQGDGATESLVRTMMKVTGLDEESVVKMTQQYIDQKLTNNHR

SEQ ID NO: 278 - protein, 558 aa, synthetic construct
MLQQSNNTITSIYPIGNQTEELTALYCRLSQDDKQEGDSNSIINQKKILKRYAIEHGYQPYVFFVDDGFSGTNFNRPDFQRMIAEVEAGRIKRVIVKDMSRLGRDYLQVGMYTEIMFPNLDVHFIAVNDGVDSHVGENEFTPFRNIINEWYAKDTSKKIRAVKRSKGMAGEHIGSHAPYGYMKNPDNKKEWLIDEEAAEVVREIFRLCVNGYGPTRIANILTERKILCPTYYALEHGEKPRTVLPPDKYLWSATVVSHILERMDYLGHTVNFKTHVKSYKNRKKIDNSPEQWRIFENTHEAIIDKETFEIVQKIRSGKRRPTKMGDMPMFSGLLYCADCGSKMTFHRQMAQSAEKHNFVCSNYRHNSKSCTMHYIRNVVVEQIVLENLKEVIRYVSDYEDEFVQMVMDTDMRQRNKELSQKKKRLTEIHSRIQELDKIFQRIYEDNISGKLSDERFMKLSKGYEEEQHTLQKEQTSLEKELQKEEKQSVDVKQFLSVVRKYTNLTELTPEIVHEFIDKIIVHAPDKSSGKRLQEIEIIYNHIGVFDHSKVTLWKGKAV

SEQ ID NO: 279 - protein, 420 aa, synthetic construct
MDLVYSLLVMIRAHEESDTKSKRVKASIRRLCEKWLDGTYRGRINQGHDPLWLRETENGWEFNQEQAKAVLRTVELYKQGWGGLRIAAQLDSEGLSLHRDQSNNSSQRIYKLIKMPQLAGHKPVKVEDTEYLLRNYYPGLLTEAEYEDLQRIANDNGRRRIKGDLPHIITGIGICVCGYCGKPMAGQNLATKPRLPDGRIRDGYRRLLCASAASYGEGCSVPGSCSVAPIERAIMNYCSDLANLQSLYGPDRTAGPRRRVKEAADTVAAIRSQLDQLANAMLQTGAESVPMIFLRKARELEQQLADAERHKESMERDLVAISHANHKNAHQEWRALSEGVEAQDTATRLKARQLVADTFERITVYHHGIRPAPHNFDKNDCIDVVLVAKGGTSRLLHIDKTGNWIASEDLNPITNCINNN

SEQ ID NO: 280 - protein, 515 aa, synthetic construct
MKYAYVNENEIKYSGGASINLMPDHKRACAYIRVSREKEDGVSPEQQKEKAELQARLMGADLLHIYEDLDISGRSDKRPAFRQMIEDVKAGKWDCVLVYKVDRFARNVKDFHHYMEILEQYNCSLISISQNFDTDSPTGRLLRNILVDFAQFESEMISERVRDNKIANAKRGRWNGGHAPYGYKAVDKQLVIDEKEAEAVRLAFRRRAEGYGVLAIAKELNMRGYKPRRGSAWGNYWSEHSVKYMLANRIYIGELNYAGETIKDAVPAIIDEALFNAAQKTKDIPNRTQASTHLLTGLLYCAHCGHYSFQIQYHGRRHVRRYVCQTKRRKSTTACPSKILDADSLEERIAQELFLLANESRLIEYAYRDLKESYQERVKNMSAERPKLLEELERVQRLMRELFSDYYDHRIITREQFTAKNQEYLAQEAALKSRLEDISHVEAQNATLDEDIRILKEELSHLAAGWTHLAPVERRQALRNVVKRVTVYEDYIEIDLFHLKQKVVPATITRTTMTF

SEQ ID NO: 281 - protein, 522 aa, synthetic construct
MVKRALGVVRLSVANTGQTGDDTQKKLIAKRVEADSLDLVGWAEDIDVSASLSPWLRPSLGDWLNNKRDQFDVLYVKSMDRIVRSVRDLCDIIDWCTKHGKSLICVEQSFDLTSEMGQAVAKILAVVAEIELNIIKSRVRASREAMRKAGRWPGGLVPFGRVAAKDGDGYTLAICPEYGPVLVEMIRLFMACKSFSVVADWLNAGNVPTVQDIARMRAAKGESTTRLNEEKAKARGTKWSPTSVQAVLTSRSLLGEYVRADGTVVRNEDGTPVMRSEPVLTEAEWLALQEVVTLVKYTKGPSETSPVRGILFCDGSDYEHPLYWAKGGKKNNKRPRIRCQGSKPKGRKPCPGHSFMAEELYELIGATLKLQIGSLPVRERRTVQDDSRAVKVAVLDAQLEQLTKELQAGKLSAAEYGQHVAKVAAEREAITSKPAARPQEQWVETGQTYADWWDSSTREERREKLLTWGVRVFAGPSGVRFEYGEHFPAAPLQVAQVGFGNAPAEAVSISDFLSGAEVALAA

SEQ ID NO: 282 - protein, 539 aa, synthetic construct
MVNKLVKPHIYLRVSNSKQQYGSGLDEQRDRIEQYIKSNHHLFTADYHEWVDIGFSAYKNKNIVDGKLGELVELVNVGKLGAGDHLIVYSIDRLSRRASWDEKTIQLIVSAGIRIHDITTPVVLDRDDPFSKIIFELILSRGHNESVVKSERSRSGWDAKHKHMVESGITMTKRLPRWLDWDATKGLVIKPREVSIIKRIFNSYVEGMSGPYLAKTLNAEKLLINDALWRPNAITKLIKDERLVGSFRGIKTQVVVPNIFPVIIEKDLFELANKRLSVNSAGIKGRVRVSKDDREVRNIITGICRCGLCGGPVSTSTNSIGVTYIRCRNRINFETCSNGGIRLDFTERALLGHIKQIDFQKLINNKHDDISELDLLNSEMELLLSDQAQCMTQIEERKKNKKSVSLPFAVALTDLNDRIGDVQGKINHISVSEPIERFEDYDIDMLCDVTNIPLRMNIRKMLTQVIETVSFVNTGGMGMIKINYVSSDLYAHLITFAKKTGEVLSVFAGNDKMIEFSDGADVVVYDKEKKTYTLNGDVV

SEQ ID NO: 283 - protein, 390 aa, synthetic construct
MRNYEKITALYERLSRDDELQGESNSIVNQKKILEEYAGKNNLSNIIHFTDDGISGTQFDRPGFMAMMNGVNQGNIIVKDMSRLGRDYLKVGQCMEILRQKGVRLIAINDNVDSFYREDDFTPFRNIMNEWYTRDTSRKIQSTFRSKGESGKHTASSPPYGYIKDEKDKDKWIVDEKAAEIVRRIFNLTMQGNGPYRIAKILESEKVDIPAYHQQKLGYGLHQSKVFEHPYRWCSSTIVSILKKQEYLGHTVNFKTRKHFKDKKSKYVSEENWLIFENTHEAIIDQETFDNVQRIRGNVKRYPDGWGEYHPLTGLMYYADCGSKMYVHRTSNYKNIPYYTCSAYTKVPCGTLCPSTHRIKAEAVLNLIQETLKDIKKYLDEDHEAFIRSI

SEQ ID NO: 284 - protein, 418 aa, synthetic construct
MSNTKRIGQTALYERLSRDDEMQGESNSITNQKQLLESYAKRNGFVNIYHYTDDGVSGTTFDRDGFQKMIKAVEENKVSTVIVKDMSRFGRDYLKVGFYTEILFKEKGVRFIAINNGIDSEKQAESDFTPFLNIMNEWYARDTSRKIQSIFRARMEEGKRVSPSVPYGYYRNPKNKQELLVDKESAKVVKRIYRLVIEGYGVTQIADILTKDKVLIPSAYAEIHYPENNHSSKKRGIEDPYFWTPTTVSYILEKQEYMGHTVLGKTICLDYKTKKRRKAKEDELIIFKNTHEAIIDEETWNNAQRLRKTVRRSPKYGTTSHPFTGLLICSDCGGKLSYREPAEHKEKKYDCDYCFVCQHYRHRKGSCSMHYIKVKTVNEILLKINQRNHRLCERRKARISKSDEQVIRRKKRRKVSRG

SEQ ID NO: 285 - protein, 544 aa, synthetic construct
MRKAYSYIRMSTDKQLSGDSLRRQREASEKYAKAHGLELIETLDGKDLRDIGVSGFKGANSRRGVLSVFLEHLNDGKIDANSILLIESFDRLSRADVLDAFSLFTNILNKGIEIITLSDNQRYTRDSVRVNPGQLFLTIGIMTRANEESVTKSKRGLSVWNNKRDNAQKKPITSRCPAWLTYSSESEKFEVIEERARVVRLIFELCAKTSGTWSISRYLNRHNIPVFGDAQFWQKSYVNKILSNRAVLGEFQPNSRESGQRIPVGKVIENYYPAIISATEFHLAWAARDRRNKTGSGRKGINFSNLFSGLVYCGNCGSKMSVRNRGVPPKGGKWLVCQNHLAGAGCEMREWKLPLVEDAIFKHLYEVDFSELLGNKSAGFDIEKELFALQVEQKELESKMDQAIEMSAAQELNEQSRFRYVKLINQLESDINEKKKCISSKEKELEVFKSQQSLLHTKELKETLLLLEKNKDDYYFRSSVNQLLTRTIARIDLITDHGGPLPWEIEPDDKIVGNFRALYPKLSSLSIDELVLQRVFLDYITLIC

SEQ ID NO: 286 - protein, 659 aa, synthetic construct
MQQQHGFGIDRQISTVTEYLSYATLDQRLGYQLDPENYEILDSDIGKSAFKGANWGAKSSLGKFYKAVVDRKITSGVLVCENIDRLVRLSNYEANNKLSTLIMNGIDILEVESGSCFSNRIPESSTVLNMSISRAYNESLRKSNFSKKSWKKRKATAEEQGTALNNNTPDWLSLSEDKQAYVINTVNVEKITNIFKMYVNGMGVTEIVKTLNANGDRYNDRGWNLVTIYNKLRDRRLNGYLVGKYKTVSQRDDETAEEAEKRLLKNRKARHEANLNAIRIYPIVIGDELFSKVESLMDKNIQARKPRSTTTKQRNLFNGISRCLVCGSPMNVQSMSNGSQYFRCYRQRTKDEHCDSKLVRYGDSERFLLNHIKGLDLNIIYGQDTEESSVESLKSHLSDISSKIDALNVQMQSASDEEELFLLMGFKRKRITERETIAEQIYKIENESHIVKLNYDYDIKAISDQNNTVLRRKTNMHLSNVISSIKCGRFDLSDVTIYIYDISYHKDLLKHVLITDNRCNLRSMITISNNCVLDVGYMKIDILNHRVDMIRQPTVTEVEMIKVYLEYLNEGFEIAFELIDEEVIKVLEVLSKKVEVLQSTFADGHSIDEVLKDVEAVISTLNPMIATCRNELIIQRFKLLYETVQFIEQGNKALLELDL

SEQ ID NO: 287 - protein, 590 aa, synthetic construct
MSTQPAPPIPKPKAYSYIRFSSPEQMKGDSYRRQYEASQNYALEQGLDLDEEFTFKDEGVSAFKGKHTREGALGKFIEAVDQGAIRPGSYLIIENLDRLSREDPHTAYRLLSGILSRGITVVALQDHQIYTPESYANDFTQLLVSLLTMHRAHQESVVKSNRLSKAWAHKREDARTQGKAMTSTCPQWLKLDKTTGRYTVLEDRAEVVRRIFKETLDGKGATMLASQFNVEGIPTFGRAKGWWNSYIKKILTNEAVFGRLQPHTLKQVEGKRVPVGEPVDGYYPAIVDRETFYLAQAMRLGRRIPGGRIVARFSNLFTGLVKCGVCGATMAFDNKGTGRKGGTYLVCSEAKRKVGACQRHAWRYPQTQAHILLNLHRLDYRNLLPDIARQALDDANQLEQQLEALLAEHADTTTKVDNATDLLITNPNNLGLLRAQTRLETKQRELETRIAAAKNQLETARRRSQEAELVAGESDDAFKAFIKAEHEGEPEKVYEMRRKMHQLLLRQLERITFHPASKPDSPFHGIIDITFKGTARLQRIKVEKGQRASTGYRVNEDGTEVLSVMEPDAVWPPEGRLLAGQDLGYLLGIG

SEQ ID NO: 288 - protein, 466 aa, synthetic construct
MVEKGRRERAALYLRQSTFREESISLELQETAGREYAARHGYEVVDVQSDPGLSGRTFNRPGVAAVMDAVESGAADVVILWKWSRLSRNRLDWYLAADRAQQAGGRIESATEPIDTSTSIGRLARGMMIEIAAFESERAGDQWKETQARRVRNGLPHDGKPRFGYVYDPEQKMFFPDPVTGPVFAGLYRRFIAGETMYSLCVWLNAQGIPTATGSNVWTAGNLRQIMDRQFAVGRVYHQGVWHPGAHEPLITEAEYAAYKQARKTRAAAPRREASDYLLAGLVRCGVCGRALTGAAARGRWFYYRCFASRFTGGHSHAQVPTRLVEDAVYDKLVETAADIETTAIPETRPVAVDSAALKRTIQQHKTSLGRLAVQLAEDVISADAYAAAAPAIEQKLAAARDALQAATAEHAIPAMHDAVVSLVKDWHILPTTHRRALLARAVESVEVDFNDERRVDVVMRGRPTP

SEQ ID NO: 289 - protein, 479 aa, synthetic construct
MMYYSYGGKMRVAIYIRKSRGTEEDLLKHEEVLTNLCNANNWSYDLYKEIGSSQDNQREQYNRMKENIENYSKIVVMALDRLSREKQEQAELTKLINKYNFEIVTPTRIYTKHDNLLMDIQELLARQEYQMIRARQIQGTKTSFERGNWVGGIPTIGYKYDRNIRKLVIDEEKAKIYLFIKELALKGYNSSTIVSECYKKNYRSLTNKDFTPTAINRILKCRTYLGEVPYSGEWRKGNHEPLCTYEEYDTICDYITHRRVGIKSKAKTFPLSNLIVCGQCGALYGSTRRKDRGNREYLKKCWRKNVATGEKCNNKGVNAYKVHQAIKQQLEKRMFELKNTLDNFDRTNFENMKNDIQAQIYSLEDNISVLESRNDNIRNMCENGLYTVATAKEKISKNEITIKEYQNKIEILKNKLNNISNKDIENNFEKTKEVLNILYKLNLDDEKNDELINKIYKTIIDKIEMTLSDEKKELKIYYK

SEQ ID NO: 290 - protein, 507 aa, synthetic construct
MDKTIALYMRLSDEDDNLAAHEESNSISHQRKLMLDHIQKLPELKDCNIMEFSDDGYSGADFSRPNFVKMMDLVKAGKIQVIVTKDYSRLGRDYLEVGNYMECIFPVLQVRYISVNDNYDSANSFGSTGGMSVALKNLVNALYCKDASKKVRAAKAVLAKQGKYIAAFAPFGYQKSEDDKHMLVPDPVTAPVVQLIFELAIKGMKYTEIANYLNNNGYDSIFEYYQKIGVKRCYERDIGEHMWSASTVMEILYNEVYIGSVINNKTADNIDTGHQVVQRDKEDWIIVENCHEPLVSVEDFKLAHKMIARREVTKRKPNGKWRKSYIRCGICGKGLYKYGNKSSYRCHNGHVSRIRGEELEATLLDIARNMALAQLQEFELKTDGGNCPDNLEREIESLKKSKAHYAKLKFEIYDDYTKTNITRDQMAKKTAEVKQKIAEIESLITEKQETLDMQKDLFLDAKQEQLTKLSKLDEFDEEVIRYLIDYVLVYDNEHIEIRWNFDDFQAG

SEQ ID NO: 291 - protein, 480 aa, synthetic construct
MLRNRASLYVRLSKAAGETNASLEGMIKELRELCAKEGLREVALHVDDGLSGGFRDRPEFQKWINDARQEYADVLMTPHVDRLTREGLNVAASLLDVVEGKDSASGRIVHHPVRLLDAKGIDSSHGDSFRFRFVLQAEVARSERERMRDRTRLSVRRLRRAKRWPGGSPPYGYKVIPNPDGPGQALGLHLEEAATIREAARAVLAGDALTLVCRRLNHHKLRPRRAAEWSRVSLRRVLTGDAVLGRITVNGALLRDDNGEIEEAYPAVLTVDQSVALREALAPDPTRPKSSGRHPARVLSGLLYCHGCPSKMVVARHSGNPVYRCQTRSQGRVCEAPVSVSARLIEDYVTGVYLNAAGSLPYLREEVHVSNASELALVESDIAEAVRLLASEATAEGFARLQQLQARKAELADQRPERLVTFVDTGMKTRDVFEAALVDDQRAMLDAAFEEIVIGPGRRGPKRLSPERVTIRWAADEPDV

SEQ ID NO: 292 - protein, 545 aa, synthetic construct
MYNTLPISNQKTKSFRVGLYIRLSREDGDKEESSSVTNQREILKRYVSEQPNFFIVKEYVDDGWTGTNFDRPKFKEMIEDIEAGIIDTVITKDLSRLGRERLGVGHYTEIYFPEHNVRYIALLDNIDTYMDAGMNDMAPFKGVINDMYVRDISKKIRSSLIERKKAGNFLGVTAPYGYQKDPNNKFHLIINEKEAEVVKRVFRLYLEGNGLTRIAQILTKDGIPVPGESRDIGKTRRTALYSSWKQTTIRRILDNRVYLGELVQFKRRKINYKSKRRITVPEEERYICRGTHEAIIDEESFNTVQNILKKNKSFKGTKHDYLFKGLLFCSECGARLNVTYSNYALKRYGEYRYTTICYSYSRLYSDICTRHSNSIPELEEVLIKHIKEVCSRYINENLQDELISMAKKQKQFELKQITNEKKLETLEQKISDIGLYIKNLYMDKVKGVVSENDYVSLVADFTKDRDNLIKEKEELIKIINNQKPQIDETAKIEKLAKEFLSLEKPTKQLLNELIEKITISENKEINIYFKFNELNEMKEIKKKIA

SEQ ID NO: 293 - protein, 514 aa, synthetic construct
MSQAISYIRFSSAKQGTGSSVERQEAMLGAWLKRHPEYVLSSIKYADYGKSGFKGEHLENGFGKLQAAIDFGVIPKGSVVLVEAIDRAGRLAPLKMIEVLSRILTAGVHIVTLDDEVMYTEESVNGPHLFLLAAKIQQANTYSENLSRRVTASYKSREVKAKAGKTIKRSVPMWLNSDGTLNPDVAPYMKQAFEDAAVGIGERRILRRLCEASSVFSGMTSTTLKRWMRNKTAIGYWPAMVDKDGNLVRDSEGNAVRDDIPNVYPPVVDADLFYRVQSVFNARKKFAAPTSNFLTGLVRCSECGSNYNKQISSRNPGIMDTMKCGQQNRENGKKCENVASIPIVVLEWIVKSTCLHAVRTALKSQHLSENGKRLIAIDVELQEVEKGLGNLASAIASVGAVPEIVAKLEMFRSQREELQNEKALLSGEAVELDITPESVEEALASGDILRLNAMLQSVSYVLTGADRNVSVGLQTFRYSGVDRKTGSFKIHHKGQVVLLERKLEGKAVQEDTSH

SEQ ID NO: 294 - protein, 540 aa, synthetic construct
MDCVIYIRWSSAEQAKGSSLERQRQDCRQHAADNGWRVVDELVDDGISAFKGEHASTGALGSFVASVEAGRFPDGVILLCEKIDRLSRQEPGKVFLWMMNLTEAGVVVATVDGSRRYSKGNFDMASIIEVVVKAQLSHEESDKKSQRLAAAWAAKRRRLNAGEKFVMTRRAPAWLEVVGTPPVFIPIPARAEIVRRIFEDTVAGLGKQHIARNLNLEGVPTFGRAEAWHASYVQKILRNPAVIGELHTARKARGTKRSMTGEVVLDYYPVIVDADLHRRAMNAMRERSRTSTGRGRKLVNLFSGLARCEACSSKMTFRGKGRKQRADGSWVNEDYLVCDGYQRGRGCENGVHYNYAIWERGILDPIIYEALHEDHAASQSEVRDLEIEVARLERVWDLAKARAESALRIAIESGRHEAQAAWAEMAEGVDRAQSALDEARERLLELVHTPSREEQWARINRLRESLHDEDEDLRFEARSKIRSAVHALVTQLSFHGPKIIGVTMTVADEWSVVIDYNDIQGDTEWIRGRIDPIRETPQGK

SEQ ID NO: 295 - protein, 506 aa, synthetic construct
MYKPFSQADYKPSDKPKALYIRKSKKSQGKTEIETIESHLKRLTDFCKDQGWNNYVIYNDYVAKSTDINRIEYNKMLNACLDGKHDLIVVVEESRLYRTVNEQTNVYEELKGTDIAILSIREGYIFPNDRNQFLTNIIRGAMNQQELENFAYRMNVKVLASAKEGKYVNKLPFGYFKDKDKLTPHPIESKTFRFIVDKVLEGYVIAEIIGQLNQLGYTTKSNKRWKDVGTITRMLANRVYLGESHYYSKMFDEDVIVRDTHPALLTIEEFQKISNMIRSRSRNPQGIRYTKINTVLDRLVLCGICGNRLPIHKSWTNKEGVTSYQVGKCQKVMGEYNEKKCPNKSISLKELLPHFYIAMESYKDSLREEIESVEIDTTSDMKIKVMEQIKDISKRIAEIQTEIQNAKSYLIKGVLSEADYVGLVPPLEKDLKDLNVALEDNERLLASLTDYDRSAVIQNAVDSLINIENESIENQNRVYRLLFEHLELVNTVNEFEIRLKEKDVSN

SEQ ID NO: 296 - protein, 552 aa, synthetic construct
MKKLLIEYHRVSDPTQLAKTGMAQQKAPSELIEKLCREHNLEVFPTVFDDRGISAFKGTKVRNGYEELKELLASGEVHPESVLVVLNQDRLSRQAVFDAQVELMGILKHCRIYVMHDNRLMDRNSENIMGDLILSLANAQRAFSESDAKSKRTKGAVLNKIKAHQNGVRGVTGKPINLGMGKLPWWYSSDPVTKEIEPIEEAVAAARAAVELFIKGESVYGVKRYLDEHHQLPEKLSKKAKNGWSIDVVRRMHKSPNLVGEFSISVDGVEHQVTEYLEPIIDRKTYLKFLSVRGSKSTPRRSKDEAVALFSGLGHCRGCGGTLTNLSDKGRISLRCTNALNRRVACPSPVSITGNWFKDYMVNVVLRYLGTKQTTRPVNSEADLKLLDQQIAKSEQKLEQLLEVLVASPSEALGKLVQSQEQQLLQLQTHRDDLEMKVVTEVFDPIEKMPENDPELRDALLRLIKDMRVSRIGRGTVLVSIFTKNDINVSVAFKSGVLLREGYLSGTSDGDAQFIDDAQFHKFVADGELDLWLKEPTDSPVLSASELSSIFD

SEQ ID NO: 297 - protein, 389 aa, synthetic construct
MVLVYKLDRLTRSVRDLLDLLEIFDQNNVAFRSATEVYDTTNAMGRLFVTLVGAMAEWERATITERTLYGKEGALEGGKFLGHVPFYYDLVDNKLIPNENRKYVDYIIKRLKENISATQIGKELSNMKNTPVKFNKTMVIQILHSPTAHGHTKYGKFFKENTHEPVITQEDYNTAIKILSTRRHTYKQNHASIFRGKIACPNNCGRFLHLNVNKIKRADGSYYLRQYYKCDKCSREKKPSTIIRYDMMQEAFMKYLNNLSFDTIEPPENNDDEEEFEIDIAKVMRQREKYQKAWAMDLMTDDEFKARMKETDKLLEEASEKEVENNELEFEQVIKIQKLLQKSWKNLSEDKKEDLIAATIDKIQIEIIRGNKTVNSPNEVKIKDVSFLL

SEQ ID NO: 298 - protein, 566 aa, synthetic construct
MKKSNELPKSIIYSRYSSTNQREESIDSQIRIINTFAKSKYNIIKTYIDSAQSATTDNRESFQQMINDVKSGNLPDVKFLLVSKRDRFARNRYDMAYYKNILAKAGISIVSATEHLDDSPESVILESVLDGMSEYYSLNLGRECIKGLKENAYTCRTTGSTPPLGLKVNKDTLKFEIDEPNADAIRLLFKRFVEDGWSYQLICDELNAKGFRTTRGNLFNSKSTLIDYLNNEKYVGRLTYLKSKKDPLTGKRTCKRNYNRDEIIVVENAIPAIIDEETFNRAQEILKYRKRNASSFRTTNKMNMLVGKVICGKCGSHMNINTRKSGKNKEYYSTYRCSAKKEKMAKRCDNRELSATHLERYVISQLMFYLKQDTIVDRITDMLNEVLEHEFDSHDSEISQVNQQLMNVDVKIKNTTNAIAEGGVSLPSLVESLRALEDDKAMLKKRLHEINSAVPVFKKIDRNEVLELIEKAKEYMLSENDELIRSVINLFIEKINVGENGVEIIYYLHPFSYISHELWKTYVTRQELISYKGFSPKIMKGRWSRKAIISLSESKPTLARLISLVA

SEQ ID NO: 299 - protein, 500 aa, synthetic construct
MKAIYVRVSTEEQAIKGSSIDSQIEACVKKAGTTNVLKYADEGFSGELLERPALNRLREDARKGLITELICYDPDRLSRKLMNQLIIDDELRKKGIVLTFVNGDYADSPEGQLFFSMRGAISEFEKAKIKERTSTGRLQKIKKGIIIKDPSLLGYRMNKEKRTLEIIEEEAKVVRMIFDLFTDHSSHFFNRVNGIALHLTKLGIPTKRGAKVWHRQVVRQILMNPSYKGKYEQYKYDTEGSYVSKQAGGPAIMKLRPEEERYITEIPSVVSDEQWEYAQELLGKSRRKQLQYGTHPYLLSGLVRCGICGNTMTGKKRKSHGEDFYVYECRKNYAGAKNRGCGKSMSENKLNRIVWDEIYKFITNPEKYRVYKEEEKATHKADELELIQKEIEKAKKGRQRLITLISLSEEDDLDIEEVKTQIVELQKKQNHLMIQHDKIEKEIKESEGSTAGENAMKRALDYLSSVNADNLKLEDKKAIINFIVEEVLIVDSETIHIRTH

SEQ ID NO: 300 - protein, 552 aa, synthetic construct
MKRQQEKFTALYCRLSQDDGREGESNSIVNQKEYLMKYAKEHGFPNPKFYVDDGYTGTNFDRPSFKEMSADIEKGLVKTVIVKDLSRFGRNYIEVGSYSEIIYPEAGVRFIAIMDNVDTGSLESNEFAAFTNLFNEWYPKSTSKKVKEVKKAKGLAGEHLGAPPYGYLRNPDDKTRWLVDGEAAAVVRRIFSLCMQGKGVSAIATTLWKDRTLTPSAYKASKGIGVAKVSEDPYCWETSAVAAILENVAYIGITESFKSTRLGFKSKKRIPTAKDRRAYIENAHAPIIDRDIWEKVQIIRENKRRPNKSGITSMFSGLLYCADCGAKLSLATANGYAHFRCSQYKRTSRTQNCTQHYIREDALNQLVLKQLQHFLSYLQQFERVFIRRQIDTTLAERRYELSAKQKQIEKDEKRMDELDRLFRKIYEDNVSGKLNDERFYKLSDGYEAEQGQLKREIEALTAEVSQADMEVTNVAKLIAVTKKYTRIDELTPEILNAFVDKIVIHEREKKDGKRTQQIDIYYSYVGIVDIPTDEEMREMEREYMRRTTRQTA

SEQ ID NO: 301 - protein, 583 aa, synthetic construct
MRTAYAYLRFSTPEQILGDSVRRQTSLTTDWCERNGVHLDKSLSFEDLGVSAFKGKHVEEGALGVFFKLVGEGKIKRGSYLVIEALDRFSRENPFAAAGRLFDLIKLGITVVTADDGREYSEETLGGGDIGPMVLLMIKLSQSHAESVRKSQRIGPAWKNKKDLARSEGIPLTSRCPEWLELRDGRFHPRKERVDIVKRIFQETIDGFGRRAIVARLNGEPIEPFKAGQKWKNPDRVGGWQTSSVARILNNRAVLGEYQPHTGKAGNRVAYGEPIANYYPKVIDEAIFWRAQSAMRERRQQSSGRRGDKGAHLLRGLARCSNCRSPMHIINKGPPPKGGIYLSCSANRRNTGCENDKSWRVDQLEEALLLCLTSFKTRSFLTEKDETSRDAEGIDAMKGELGELESRADNLLGMVERGDKRAETRYLELSAEIEKRKAAIEGAEKELGMRQSDPGDEARLAEILKLSTDIFTLTGPERLEARTRLSSLIRRMVHLIECDPDRGPYAVLAIDTKLWHITRPTEGAFAYQIDLPAWGVEEPPPRLLFLLAKNPSADARDAFFRKRGGYLLSPEGSKSFFPERAKS

SEQ ID NO: 302 - protein, 575 aa, synthetic construct
MTNEKSYVNMEPCTMGLSADQHVKEDVMLDQQKITILYCRLSNEDAMDGESNSIQNQRELLTRYAQDHGYTNIKVLVDDGYTGTNFNRPAVKEGLELVKQGEVGCWIVKDMSRFGRDYLTVGQYTEIIFPSYDVRFIAVNDGVDSNRGDNEGITAIRNLFNEWYPRDTSKKVRVSLRQRGTSGKHMGKPPYGYRRDPEDKEQWIPDEDAAPVVKRIFDLTVAGKGPSQIARILERDGVLTARALYAKRKGKPLPDQPYHWGEQSIVGILERMEYTGCVCNFKTYSKSYKLKKRIPNKQEDMFILPDTQEAIVSREQWDRVQELRQNKRRPTKAERQGFFAGLLYCADCGSKLHFATSKSFEGKQDHYVCAKYKSGRGTCSAHYIREEVLRDAVLERIRAVNEYIREDAESFQEEWLQCRRADQERGIREDKKRLAQAKKRLADLDVLISRCYEDSVLGNLSMERYKKMSADYEAEQERLKLEIEVTEEWVQQQEEMDTNLDSFIALTEKYVDVPELTQTIVNEYIKKIVVFPPDKSDGKRRQKIKIYFNFLDEFEIPALEQSVTLEQTYGRRKTA

SEQ ID NO: 303 - protein, 605 aa, synthetic construct
MSPFLPSLTVPVAYSYIRFSTPDQNKGDSRRRQLDASARYAADHGLTLDESLTVQDLGVSAFTGSNFERGALGQFVTAINEGRVAPDSYLLVESLDRLSRLPVTEALAVFQTIINLGVTIVTLVDSAVYSKDRLRNDWTPLLVALVSMSRAHEESAVKSRRVKAAWDAKKERVKAKKEVMSGRCPWWLKPSDDNSHYEIVEENAATVRLIFDLAKDGLGGEAIAKQLNARNIRPAQHAKRWQNSTVQFNLRNIAVIGVLQLDQDNNGRTTTNTFVEDYYPPVIDKALFYEVQALRAERNRNKNTMSAGRKGQCYNIFQGTAKCGYCGSPMHIRRKPGVNSGFLYCSKSLQGGGCVGVSYNIRQLEAEFIEFTRELDLSHILGDTSTDNALTEKKAGLSVCNAMLEEAQTKLANLLNAIEAGGDMPILVQRLRDVEAQVNDLKKQRLALQSEVEILSNTSRDEQVSLEMLSRLMEQLGSKESDLEEKLRLRFRMLGEVQKVVRRLDLFPGGPMLAQEQIDELRSQLQSGGFDNGRIDDYLTQLPIKPDRSARYFIAHLRNGISRTVRQGQVMETDSARSQKVRSAIHGAVTEEANRDDETLLPSGR

SEQ ID NO: 304 - protein, 522 aa, synthetic construct
MRTLIYARYSSQLQNPRSVEDQIAACRKRADDEGWEVVAAFHDRAISGAAGIEDAQRPGLAALLAALDAGGIDQVLTESTDRLARHQGDAFAVRERIEYAGARLFTLMDGVVDEITGTIKGLFDARTRKDLAVRVRRGHKGNITMGRATGGVPYGYRKVARLDEAGEPVRGLREPDPDTAPIVQRIFRDYAKGQSARAIAAALNAEGIPSPRGGIWRASTIAGHRKEATGMLTNPVYIGQLHYGRTKMVSDPRTRRRSSRMGDGEVTIGQAPHLRLIENDLWQAVQDQLEARASTRPERQRRPKHLLSGLGQCGICGGTWVATRATYFGCGQHMGGKACTNTRLIRTSEYEERVLGELKEQMLAPDVVEAYLEEYRTEHARRAGELGRNRARIERRIGDAGRKVERLVAAIADGGAEFTAVKSALAAAQKELAEAEKERASIEALPQLALHPGLARQYRAAIEQLAVELKDEATRLEAAPRLRSLIARIVVTPSKGKRGVDLEIVRHIDEVLDLAQPDRRRA

SEQ ID NO: 305 - protein, 515 aa, synthetic construct
MKVVIYARVSTKRDAQKNSLENQVSYAMNLAAQNGWTVVGQYIDDGISGATRNKRDGIMRLLNDAKKKKFDAVIAKSVSRLGRNSVENMLTAYEIESAGVRLILPEDNYDTETSTSKLMFNLKAVLAEEENAKLSERIKIGLRASARQGVYKASLPAFGYKRDPFNKRLELDEDYAPIVREIFDLYLYQDWGMYKISNHLIERGIPTPRTVSGGSNAGELWHQSTVKLILSNIVYTGTLIHHREETKDFISKKRKKVDPNQQIVFENAHPAIISMDEYNAVQEKMKQKGKNKSNGRESLFAHIAVCADCGKGMVYRNDRRKSGAYVCGGYVKHSRSFCSSHIVESDTLLQAVKDDLKELIADNVKLEKLYGAVNGKASEQQAKYAKELTNVSKRLKQLNKEFQSLLQLYSEKVIDIVQFRAQNEHIQEEQTRLTQKKAEIESLLETQKDTDYQIHAFKKQIARFAKLDIDDEQVLKQVLQRLIQRIEVNEDGTIKAIHYNITRPHSVRALEKRGA

SEQ ID NO: 306 - protein, 458 aa, synthetic construct
MTKAIIYARISKDRVGAGLGVERQAQDCRELAERLGWSVLRVESDNDISAYSGKPRPAYRRTLAALESGEANAVIAWHTDRLHRRNVELEPFLDVVERTGAQVATVKAGPVDLASPSGRMTARILGAVAQQEVEHNRQRVIAEKRQALAAGKYRGGARPFGYEADGVTVREDEAEAIRRATTALLAGESVGSIVRLWNDTFAPPQRARQWSRPAVTAVLKRARNAGKTESKGEIVGDALWPAIVPLDDVLAVRAMLSDPSRRTAVGAPRRWQGSNVYICAETGEPMTTAKARDSDRREYRPKSRRAGVCVTAELIDEYVSTVICERLSRPDARELLSAPGIDTEALTAKRAGIEARLDESAGLYAAGVLTAAQLTRATADLRAQLDAVDSELASAVNDADLAALVGAEDVRATWDALAVDTRARIIRTLVRVTVSRHGARGKARIFTPDAVTIEWLND

SEQ ID NO: 307 - protein, 630 aa, synthetic construct
MTTTQTLPAVDVQPAQSDAPKRLAYSYVRYSSEQQMTKKNGEVGDSVRRQMENQRKAVETYNLHVVDVFEDLGKSAFRGKHRLKGALSLFLASLDQGKIPSGAYLLIESFDRLSRERMTDGLTVVLTILRKGIKIITTDDLKLYDLSIKGKDLEQTIMITVLLERANNESTTKSDRQKAKWEGRRERIIKGEKKFLNKNVPWWIALDESTGAYSLIPERVAELKTIYELMMVKNLGLRAAAAYINENNPLKVGFGKNPDSYGWTARGIKRMIETPSLYGSLELCEYIYENGKATPDRKTIKVMDNFYPAAFTRHEVDVLKAKISSRMTSKERPTKRDLQYYNIYHGLIKCAFCGGNVRFSQKQKYSYLVCRNSEIKLCKHPKTLSMQYERFHEVFFKYAQHYNFELLIQSGGNDNEVVVKEITEIEETIAAEKYKAQKFTEKLFDMFDGDIPAEQEAALITRNKKIKLMEAKAKALRAKIVYVDTDAETISDAIQLVSKMVETKDGRLELSNYLTKVIDKMVVDFGKAHNRDGDYVKVMFKNKDFSHHMLIGKTTAYSYDSDGELFLDTLQGVVRDDGYYLEAQKAQDEWFDVPDFTDLEIYDDEQAKVNQAVDLGHRGDDENGVDSEYQ

SEQ ID NO: 308 - protein, 429 aa, synthetic construct
MSVNTVMSGALDLSTASGRLNAGIYAQIAQHEAELKAERQRRKERELAEAGEPRTSVRAFGFENDGKAWRQPEAEMIQQATTDVLAGTSLAEIIRRWNNTPYKTARAGRDWNHETVRLVLTRWRNAGLRERNIRDDQQRLVKTELYPGTWEPLVTREQIEAVRNLLFDPKRRRNSGAWARKHLLSFFLVCGECGDFMRAGHTTSRTGKKYMTYVCGGLRKNSRGGNCRLGIMYETVDDAVRDHVAKRLAFPDPALLRATDDDREAFTRNHEARAQVEKRRQQITSAPIDDLDKLPMLARVKIELDALAEEYERLAQRGALAETMRGFAKIEDSLVPEDSSTTEYAVDVLKLTRDLKKARTSARERFDGLGLSTQRQIVTALMTVTILPAVSGKQYRGNRELSVERIQITDLDPANGRPIEDLWSDVATE

SEQ ID NO: 309 - protein, 492 aa, synthetic construct
MARAYAAKHGLELADVSFRDLGLSGFDRSNIERGALAEFLTAVKSGKVEPGSLLLIEQFDRLSRAEISVALRLLLDLVASDIGVVTLVDEKLWDKNTVNDMPNLMLSLILMFRAHEESLAKSQRLRAVWTEKKRTAGTKILTAECPRWLTLKADRSSFSVIEDRAEAIRQVFALSAAGIGANAIVRRANIEKWPVPGKGDSWHMSLINRLTRNRAVLGEYQPYSHLKQGGKRSRNPSGNPISDYYPAIIDPALFSTVQAVRERRPRFPGRRDVEYRNFLHGLVRCICGRTLFRKGGDKNYPDYARYYCSGRARGATDCPSIDSKELESTVLYAATALAGAYFSPSTKMAELKEQADSLTLAMSAGQRRIERLVEAIESTDTPPSALVSKLTLVEQEVREAEQRHAGILAQLAEMSKAGDPDERLGAAFALASGGAEERSELREILARLLAAVEADGRQHRVRIRFHGGDVWVNVPLNEKARLPGVVHTVAPP

SEQ ID NO: 310 - protein, 522 aa, synthetic construct
MATSLVRAVVGARVSIFTDGKESQITQRTKGTAYAESQGWTVVGAFEDLDVSAIKQSPWDRPDLKQWLTDRADDWDALVFAKTDRVFRSAADCVKLSEWCRDHKKILVLVDDGIKLDYFHPDSQQDAFAGAMSKVFLILASVFAEIEGQRFVQRALDRVTQYRHQPRWAYGVPPYGFQVVDRPEGGKTLGHDLEAQQVLQGIATRLLSGDSLTRITADLNETGVLSPADRLRQRTGKELRGSRWTVITVQTILTNPATQGIKTAKGKPVLDAGGEPVRVGPPSFDSETWGRIHSELAQRSQSGQQRRHSDNPLLGVAKCGVCGKNMRHFQRTKGGRHYRYYICGSTPKACPGVLINADNAELAVETSFLDVHTNRRIKERVWRAGSDHSAELEQTTNTITALWEDRALGLFTTPEDQDMFRSQMAALVAKRDALAQTPVIKAGWVDVETEQTYGAVWPDATPVERRKMLTDAGMKLTVYRANKYETYVDLDKAIGEGSVGEELHSELEARAAEERRRWGMPD

SEQ ID NO: 311 - protein, 505 aa, synthetic construct
MTRAALYLRQSMDRDGRSEGIDRQRARCRALVESRGWEVAGEYVDNDVSASKPRGKGTAWHRLTEDAKAGRVDVVVAVDQDRILRGIRDLVTLMDVGAKITTVDGEIDLATADGEFRATLAAGLARFEVQRKSERQKRANAHRRERLLPSGGRRAFGYSKLAVGASAEWPKRVTADGREYPDYGHEPLEPEATAVRRGYAMLLAGATLRSIARAWNADGLTTTAGKPFEAYSVRNVLANPRNAGLVAPPRSATEGQSAQQNLRLADLPVGSWEPLVTPETWAAARDLLADPVRRSNPGALPKSLLSGIARCGVCGGPMKAGVVRGIRSYRCSESPHLSRKRDDADHFITHVVLDRLARPDAVEILRRDDAPNVAELRARLLAKQQGEANVLALVAGGHTTLAKAEAMLRDLRAEMGALEAQMSDAGRVDVLGDVVARAEDAGAAYEARWAAVAEAWQALDVDRQRAIVRALLSIEMRSPGKGSRAPRDAAGRLAHTEATLALTWH

SEQ ID NO: 312 - protein, 606 aa, synthetic construct
MKKQAEKGKITALYERLSHDDERAGESVSIENQKRILEDYARKNGFTNIRHFTDDGVRGTTFKRPGLDAMLDEIRAGNVATVIIKDQSRIGRDVVEVGLLKRTFDEYHVRFIAANDNLDTANGFDIMSIFRDVINEWYVADTSRKIKTVFKSRMEKGLRCSRSVCYGYLASKEDKHEWIIDEEAAAIVRRIFHSVLAGESIASISRAFRAEQIPIPSEHWKRIGAPVRAAKYADPYAWSVTTISSILKRPEYMGRKILGKTVCENYKTKSTRKTAPEEQYVFDGAIPAIVDEETWHTVQRLRETVRRAPKRKAAPNRLTGLLYCADCGAKLTHRYNLVQGKWIEDAFICSNYRKLTRDCSMHHIPTQKIEAAILAAIQRVSWYVQNNEAEFIERVREASDLRQEEAVKECKQRLSKAQRRHKELDGLVKKLYEGNATGKIPDKHFTRLLTEYDEEQAGLEAAIGEWQEQLDTWNADRLNTDKFIELAKRYTDFTELTTPMLNEFIEKIIVHEGKGSGNDRRQRIDIYLNFIGAFEVPAHIVTPMEAEEQRRQQEEQAEKEAHSQGLAKSAGATEALKAADPMKWVGLMNACKAQAEEIIRYELIYV

SEQ ID NO: 313 - protein, 493 aa, synthetic construct
MSQKQAILYSRFSSTQQSDGNSMERQLKAAISYCERNALELSSIRFSDLGVSGWSGVERDGLAALLRCVREGYVPNNSYILVEDADRLSRQGFMHVLQLVTELVETGCTFVTLSNGQQYTKHNVKNLSTALPLIIAADLAQIESQKKSERLRAVKTQKRMDRVIQGNQPFWITIVDGIPKLNDKAELARRIVDLTLKGYRPLHIARLFNSEGIPSPRGKNWAVAVIRRILSNTILYGAKSYHESRDGNYDAVETVKGLYPAICTHAEFQQIRVEKSTKKGTAETGPFSKLLRCPCGSALVIKQRRGEDTYRVCSAFIQNACTHNGYHKNIDSALMKVYQMVPITNKVTPSNSPDAERLAELHESLAVFEEMRLEFSGKPKMLARVYADIEKTENDIEEIENKLRTEFQDTQETIDIQDLPSIEQNAILRRYIKSITCEKLNATDTECTVETKSGKFSSIYISYTRGYKEPLVVSTFLNNNPHDNGGDKFGLYE

SEQ ID NO: 314 - protein, 524 aa, synthetic construct
MVFLLPLPYNTDIQIRSDHVVAKADETPIGKIKVAIYIRVSTDMQVEDGFSIEGQRTRLNSYADSQDWKVFDTYIDDGYSAKDLKRPAMMRMMEDMEEKKFEVILVYKLDRLTRSVGDLHGLLNTFDRYGVKFKSATEIFETTTAMGRFFITLVGAMAEWERGTISERIRFGVEQMVAEGRRPGGILPYGYTQEGVLIPEEAEQIREIRDLYMSGMGYKTIAVRMSREGKLRRESEWTSATVGYTLENPFYAGIIRMGSKTPEGLYVNTRKSERVKCVYGKGSHVPIFTDEEYEETKQFMKRKTHSGYSKIKIYWFSGVLRCGRCGGAMFGHLSTRRTTSRGVVRTPHYICSNKHHSNKCDLPMFRQSHVEHLIMEYINKVQEDTDKLKSASLEMIADEGKKTTEIDKAKRDLLKVSDRREKWQYMFVEGLISKEDIRRKMAEEDVAEQEAKQRIANNQKSLSGIPRVTELAGLAEAWEYIDDEEKKEYIYTIFNKIEVNTDLTRPKGTKDKFFDAYIQDVTFN

SEQ ID NO: 315 - protein, 575 aa, synthetic construct
MPKCYSYIRFSRPEQMRGDSLRRQTEAAEKWAAENGMVIDESLTDLGVSAYRGLNRLKGALGKFLELVAGGQVPKGSYLIIESLDRFSREDALDVISEFSKVLRSGVTIVTLLDGQVYSRERIKAEPMALFGSLMVMMRAHEESKTKGKRVGEAWEKKRKSASDAVLTARVPGWLQVVEDGGRRRIEFKPHGREVVRRIFADTVNGYGKLKVAQRLKEAGFETFEDGKTWHGSYVQKVLRNRATFGEMQPYKRDEEGRRVPAGPPVKGYYPAAVSEADFMRASAALALRDKSGGPREATGEANLLRNLARCTCGGRMRRENKGGKSSAWLVCAEASRGDCTNTRRWRLDLAEEKLLGCSARIDFRKLLAAEGEKMDAPPTVADYEAKAAEVSKRLAAIMAVVEMGVTAYAHRAVELQKESDEAEAELARVRRLGAIGAHQPTPEQRRRTLAELKARLAGATDAERADLRVRLAQEVRAAFKEVTFGPDRITATYKGMVPFGKVLQPRDVTVLIHTENPDEIAEFQSAALEMDEGNRRSGSVAEFARRQRARSGALENLEPKVDLLDEVFDPMPAV

SEQ ID NO: 316 - protein, 462 aa, synthetic construct
MTVGIYIRVSTEEQAREGFSISAQREKLKAYCVSQDWTDYKFYVDEGKSAKDTNRPYLKLMLDHIQQGLIDVVLVYRLDRLTRSVKDLYKLLDLFDKNNCIFRSATEVYDTGSATGRLFITLVAAMAQWERENLGERVTMGQVEKARQGQYSAPAPFGFKKQDETLVKDKKQGYILMDMIDKVKKGWSIRQIAKYLDQSYLPIRGYKWHIATILSILHNPALYGALRWKDELNETSHEGYLTKEEFEELQNILYSRQNFRKRQIESAHIFQMKLVCPQCGNRLGCERSVYFRKKDQKNVESLHYRCQSCALNERPSISVSEKKLEKALLLFMKNVKFDLEPVVKEEKNETTEIQNAIVKIERQREKFQKAWASDLMTDEEFTARMSETRKAHENFTKRLSEIQRATPLPIDIKKAKKLVNEFKINWAYLNTEEKREFVQSFIEKIEFTKKDQNPHILNVSFY

SEQ ID NO: 317 - protein, 476 aa, synthetic construct
MSATQTAIYLRQSLDRDHNELAIERQRAACLQLCAANGWTDTIEYADNDTSASVGYRSGYARMLADIEGGAVQAVVCYHLDRLHRQPRELEDFIELADKRRIALATVTGEVDLATDTGRLVARITGAVAKAEVERKSARQKRANQQRAQAGKVWNARVFGWDANEIVVHEAEAIRTASRDLLNGASLWSIAAQWNSQALKTAKGCGWTGGTVRQVLTRASNAGLVTYDLRAAQAEARTKGKPVHMAGIVEGAEPGRPAIVDRDVWEGVCTLLADPKRHTGRSPGRKHLLSGIAICDACGKPIGTGVRGTRTGGKRAVYSCKRIGCMKIVRGVELTDKRVVDAITKRLAEPDAAVTLARPTVDAKALRDQIELLRGQIREAEADYDDGQITAARMNARIERVEAKLKPLQNKLLASRMSADVMSLAGRPDAAKRFAALPLDRQRGVIDTLATVTIHALNRPGGRFDPKAITVDFERK

SEQ ID NO: 318 - protein, 503 aa, synthetic construct
MDTENRRAVIYARASKDRSGVGRSVQQQEAECREWIEEHGWAEGPVFTDNDISASKFSTAERPGYQSLLKALRGGDVLCVWESSRAGRRMEDHLQLRELCANKGVLLCIGGRVYDMTNPDDVHALNQAASTAEYESARMSKRIRRSIKRSAAQGKPHKMLPYGYKKDKETGLWVEDEQAAPIVREVVRRVLAGEGFRGIAKDLNERQVPKPGRGAADVGKPWQGAVLARMVKQASYSGYRTHHGKIVGRGEWPALISEDDRERLLALLEDPDRRMTTRGPEVRHLLTGIAVCGVCGRDVRWRKPKRNTHGHYLCRDSHVARSEPETDAVVVKAMWKAIEEWKADALLWLEVEEDDEGNEIGYAAPKNSAFTEQRRQARELRERLADLERRMINGTIRPEVYERADAELTPRINELEAQARAELVNPIVKALATDTRRLWRGMSLEEKREFVRFTVRVRILPMRRGPFDPSSVEVASALPDHDRTTVAVLRSSALAGGAPVISQ

SEQ ID NO: 319 - protein, 486 aa, synthetic construct
MKNSIEKIGAGYIRVSTDDQTEYSPTSQIKLIKKYAKENNITLLNDYIFQEDGISGKSADKRPEFQRMIAIAKSKDCPFNVILVYDFSRFARNKNESVMYKTLLRKKLGIDVISITQPLSDRKESVILESMYEAMDEYYSLNLSENVIRGKIEKASRGEFQGNPPYGYIYNKNTKSLEIDKNRADIVRFIFNEWNNPEMTIRRLAVKLNDMGVKTTRGKLWTDRNLHIIIRNPAYIGYIRFTPGGMKRNWNDPNMKIIKANHEAIITQEVWNMAQRKMEVHDKTYFRYMKPAPKNEHWLRGLLKCSDCGTNLYKRKVHGRPAVFECGWVVKGRCKYSHYVRESVIVNAILEQLKKDYTEKLNINICMTSQGDSEIDIAYKQLDKLKKKEKRIKDAYLNEIDSLEEYKENKKNLAEEMQKLNEEINKLKLKNATNQRKEKIFKFSEEAYKLLSDKNVDEQIKYQVSHQLFEKIVYNKKENSIEITYK

SEQ ID NO: 320 - protein, 565 aa, synthetic construct
MKTLIWYKRVSTDRQIDGHGLKRQQDYFNSYLQNLPDRNSYRLEEISDEGLSAFHGVNVSDKGGLGSVLKRIQSGDISAGSILVCESQSRLTRLHAVDATLLIHTLNQAGITIWSLADNREITTDSDTGLIMAVLDGIRNRAYSQDISDKVSKKKKAIRQAVRVDKTATYGNVCPYWLRATDNGFEPIPEHVQTIQRIFKERFELKSMASIAAGLNADAVPLITSRNWKKKAAPTGWSQSTVKNLLSNERVIGTLPASTRTSGDKVPGYYGDPVVPLEHWLAAQESLSHRGKKAVRNDKNPFAVRLFKSLMVCQHCGHKMDVNGARQALSAKGTPYHGSLICRGARDNSCMCGEGGTRTPALPMKLVEHSLTCNLFRSLKQRDISNGAQEQIARLRLEITEAENDLAATAPLIVNQRNAIARQALQNELDKLADTISQKRAELATLERKQQATTLETLEGLDLMTVDGRLEAQRVIAKSLALISINTVTAFADITLRNGNVIQGFDLRSTDDFTSTMTHATDDSHHEEIAMVIGEHLPAVYTAKKPVPATDEPDYSDWPEPDTDE

SEQ ID NO: 321 - protein, 467 aa, synthetic construct
MTSTNNNTTTRTALYARISHDPTGEMLGCERQLKDDHALAAHLGWSVVGEYVDDDISAYTGAARPEYERLLDDIEAGEVDAIITWHPDRLYRRMVDLGRLIEVVDRAHCAIRTVKAGELDLTNPTGRMTAGILAQVAQHEVELKAERQSSGNQQKASAGKWTTRRRVFGYKFGGQEIEPAEAQAIRQAAIDVLSGTSTGEIARRWTKAGLRTTRKGNPWRSRDVVPVLRRPLYACRVMYRGQQLDVRGQWPQILDDETHLGLVALLDGRRQPRLKTRKYQGTGVYRCGKCGDDIDQVLECSASGNRGKVYRCPRLHLSRKQEVLDDYVSDIVVARLSRDDAHLLVETGSVDVPGLRAQRDALQARLVKLAAMFAAGDIDDAQLKAGSGQLHADQAKIDAQLAAQAQRDPVAELILAGDEVETNWGAMSADRRGKIIDLLMTVTVLPAPLGLRRFDPDYIDIQWKKES

SEQ ID NO: 322 - protein, 534 aa, synthetic construct
MLMTAQVYSYRRFSSPLQKQGGSIQRQSDYAIEIAKEFGLELNEDLIMTDDGLSAFSSEHVNKGALGEFIKAVDEGKVERGSVLIVESLDRLSREVPMQAQIQFNELISKGITIITANDRQVYNIESIAKDPSKLFLSIAVMIRAHEESLTKQKRSVAFIKQQVKKYLTEGKGDVAGSVPFWIDKTAKGYELNENADIAKLIVDLYMSNNGLNTISRELEKRGINSPKGKARWGVTTIRKVLDNPALFGRKKFDLKYLKDGREQIDNFTLDEYYPPLIDKDVYLVIQDKKRKKSGSREAYGKSVYLLSGYGEGKAICSKCGYNVGSQLQKQKNRKGEFTKNVMRLHCNKHKESLNCCSSFRAQRLESAFVSAIVSLVDRDLLLHPTKNKTKDRQNLEAKLDAVETGMKNLVDRLALNLGDTAIKMLDSKLMELDKERNALQVELDNLNHNPVSLEGFSKLRELAEKVKDFSNFKARKDFKHVLLQVVKRIIIDFGKESLSVEFTNGNKLYLNYIVDKDTYQSTVYYERKNFKSS

SEQ ID NO: 323 - protein, 481 aa, synthetic construct
MKVDGTTSSGLRVAIYTRVSTDHQAEEGFSMEVQHEKLMEYINRNKLMLFKFYSDPGVSAKNLNRPGIKELLRDFDDDLFDIILVHKLDRLTRNIGDLHNLVEMINDRKKKLISYTEDIDTSTPAGRMFVYFLGVIAQMYRENLGEEVTKGMRKRVEKGMHNISVDLYGYTRDTNGDLMIKEEEAQWVRWAFEHYVSGMGSTEISIQLNNMGIIRNRGGRWEQSNVIKMLENMHYIGKVHCKFKRDDDTTISEGKHEPIITDDLFEKAQRVLQRRRDGMISNNSYEYVFGGIVKCGVCGATYTGRYSINRSPSRKVNRHYVCSNNVKHKTCHQAGISEIKLAKLLFDSIQLIGKNYTRKDMPKKERSEYDEIQKAIKASEDRRERWQLAYGDGNMPYEDFSKRMRAEMERIQELEKKLSTIPQQVVSYLTPESAATQINDLKYNWNYLDQNTKKEIMQSLFQQIVILKTGDSWEISKLTLA

SEQ ID NO: 324 - protein, 541 aa, synthetic construct
MSEAELHILKARMHEGRKAKARRGELILGLPRGYVLKPSGEVALDPDEGVQRVIRLVFTLFEKRRSISGVLRYLVDHDIALPDRIRSGPEKGDVCWNRPNTATLGDMLRHPGYAGAYVFGRRRHDGRLRVPGKPHSGRRFVRDPQKWMVLHQSALPAYIDWQTYERNQELMAANRSRYTGVPRGGAALLGGLISCGVCGRKMVTGYNDDGREARYSCSYEATTYGGPRCQSISARPVDTWVTALMLEALSPSAIDVSLQVAEDIELERQQLHEGWKQRLERADYETALARRRYEAVDPDNRLVARTLERDWEAALATKQALADDHQRALARQPERLTAQEKDAVRQLAEDVPSLWKAQSTTSRDRQTIARMMLDRVVIRVFGETERAEIKCHWAGGIVTTHPIIRTVRRFEQLEHHDEILDRIAVLRAEGATARQIAEDLNAKGWTPAKKPMFDALIVQKLLVRKGLGKKRPIWSGNVPRWNDDEVTLQELSEQLGVHRQTAYGWLRRGKLKGRVAKVGAQRIWLVSLSHASTGIRTGESS

SEQ ID NO: 325 - protein, 520 aa, synthetic construct
MELLVQYVRWSTSEQDSGDSLRRQNSMFDNFYKKHSHKFYTSPTHRYVDKGKSGFHQKHKADGEFKRMFDNVMNGTIKAGSVIACEGFDRMSRADNDDAVEDVRQILHKGVEIITLSDNETYDKSSLSDPFKLIKHILIAQRAHEESLVKQQRTLEVWSAKTKEAKLSKKPLGKQAPGWLELNEERTAFYIIPDKAELVRDIFKKRLSGMSMFAVTKWLNESGKPPINDRKVRISKTAKPGGGNWSALSVKCLLTSRATLGYLPAKISKEDYKTVLREEIPDYYPRIVDDQTFYAVQQLLSETGKGRITKGEHWLYTNIFRTIIRCACGLTMQPSGIRKPNYQGTYRCNGMSEKRCPYGAVSRKTLDTELCNRLFSKLSQLFDEHVDATRLEELQRDIQRIDDELAKLTETLIALPNITQIRDALDAKHKEKDSVLFELKREKARVDSVVDMDLSKLNFETVEGRTEAHIIIKKLVREIVVNSRDKLVDVYLHNGNVIEGFSLEGKYDHTLSFTEATDEE

SEQ ID NO: 326 - protein, 583 aa, synthetic construct
MHARMRGWPTMNATATPKRAVVYVRLSRHQGAADPSTSPESQRKRCEAFAEAKGWEVVEVVEDLDVSGSDKGDRLNRPGLKKIRKRWADIDVVIFAKIDRLARNVVDFNTFAEEAKGHGVALVSVAESLDLSTPGGRFTANILAAFAEMEAATIQARVKQGRVDLIEARRWAGTRPPYGYRSAPHPSGKGRGLVQVPNEVEILRGMVAEFLPHGAATDPAKRHGSANAIARRLTADGIPAPRSAYRRAQLAALDGRPVEDLAVLDRGKWNASTVRALMRGNALAGYMTRDPERIGKDRPDPASLDVVRDAHGAPEVVWSPVVDGSTLRALRKRFPASTRKAPAGPVKGRKPSGLLSGKDGLAKCGLCGGTMNGGTSGGSPSYRCDRPGGGALCSGVSIRRAALDAIVEEAFLGAYGRLLVTIVEEVADDTALAAEREEVDGLLSDLEARKRAASPADRRRLLSEEAALWERHDALGVAAPETRTVVRETGETFAEAWESADLVDRRAFLAARIDLVEVAPASKSTPRVDSSRVTIYWRLTGEDAREILSPAEAVAARSAFTPCRAPGRHDAAGGVCCVVGGRR

SEQ ID NO: 327 - protein, 506 aa, synthetic construct
MILKKIIVLNRVSSNRQDFESQNNAIREYIDKNNILVDQWITEEGVSGYSNKLSDRQAIKQIEEMALLGELDTLIIFNLDRIGRTTEGAEFIKRMTYSNVKVISVTEGLLNSGNDTDELINGIKFWMAQQESKKISLRSKNGKEATNKKGLFAGGPVNFGYGVLDQKMFVIPEEAEIVKLIFDLYIKCGKNETVKYLQEKNITKRGKRFSQHMVHDLLKDTVYIGLKRYNQWQKVSTDPTNKKRKYNNETLKFQEYREELRILDDNTFNKVQELIEKRTSSKDKVKYTNRTNALFEGLLWHRCGDEEIRKLHLDNKKDKYGNVIYSYRCSHCRRNFYKDVTKTYGSKKYNKLLENNVLKLMNNMSIEELEKKAKEKQGSTSNSILVSIESHKKELDKKRKAISNMEKELINIFSGESSMDKDILINMITKTKEDIVTLSDNLKSLEAEYIEISKTISIDRALIEQYKSFNYVYGLADDKQKKLLLQEVVEKITFDGDKLIITLFLE

SEQ ID NO: 328 - protein, 546 aa, synthetic construct
MTKAYSYIRISSKKQERGEGIRRQLERADAYAKKHGLEIDTQLQDIASGYHAKHVTHGALGAFLDLVKEGRIEAGSVLIVESLDRLSRADVISAQAQLLTLLSAGIDVVTLTDEARYSRDRDFTQLIISLTIMSRANEESSRKADFSLKYHSQRLNDIAAGHKRHIVKLPRWLDQTRIDGSKEYDYSLNRHAETAKEIFRLYNKGLGASVIAQRFNQQSIPVYETKTKWHVNGILRVIRSIVAKGDYQVDDVVLPDFFPAVVSRKEWQIANDRLSKQDRTGRRGKTVTNLFSGLTKCFVCGGNARVVGGGSAYKYLTCETAHKTGIHCDGEVKWGKRALPYDPIEKAILDNVGLFVEVEESPKDASDLAKEVAAHLLELDGINKKINNLLDLAEDIDNVEDRANFRKRLAERRSEKATIEQMLSEKQTLINEVATAKDRKVDLKSYVDDERTKWPDMTVDDLYESRSNVALRIKSIVSAVRIDAGSNEVHVAVGGVTKGWTFSGKGDVVSSFDFSHLPIETIQKMTKGVGLSVSEKDIEKVRGSGA

SEQ ID NO: 329 - protein, 534 aa, synthetic construct
MKFKIYSRKSVFTGKGESIENQVEMCRDYIFANFPGSEDCDITVYEDEGFSGKNLDRPQFQRMMRDIKRDKPDCLVCYRLDRISRNVGDFAALIEELGRRGVAFVCIREKFDTGTPMGKAMMYIASVFAQLERETIAERVRDNMLMLAKMGRWLGGTTPTGYTSERVREIIVEGKVKFSCQLKEKPEEIRTVQTIYEKFLELQSLSGVRRYLHEQGLRSRRGEDFSLIGLREILQNPVYCAADQEALNYFTARCADVCFTAEACGRGRGLLAYNKRDYTKGHAPRNPVEKWIVAVGKHRGLICGRDWAVVQELLEANRSGARRVGAHNSYALLSGVIRCTRCGGRMFAKARSGRDEQYDYICRTKLELGRGACSCQNLHGEQADDTVCRCLEAHMRPGPGLERLLEGMRREFAEEEERTPTAAARSRREACGRELDRLVLALGSGGGQDGAFVQRIAARAAELEEELRRLEAAAQKREQRAESGKAEALCAEFLDPAQCTARMSVPEKRALIRRLVQRCEWDGGTLRIFLSATG

SEQ ID NO: 330 - protein, 494 aa, synthetic construct
MKKVKKMKKNVCLMRVSTDMQETVSQKTAIEKYAKDNKIVIHEYIEEGGVSGFKTKLEDRVGLMKIKQMALENKIDTLIVFNSDRIGRRMELVGFISLLDECDVKILSVTEGCLNKGEDTDSLISSIKMWMAEYESKKISERVKSGKKATALRGEFLGGVPNFGYKLGDRRLEVNKEESEVVKILFNTYIKNGSVGVLDLFEEKGITKRGDKWTRGKIIKTLKNTIYIGKKPLSDGEIPYDEKLRIVSDEVFYKAQEVMKMRTTKIKGNTTKFVNKSNALLEGIVFHRCPDGNIRRLHIDYNSGTFKEPEKKKLLYRCSYCKSRRYKDVQKTYGGIKLNNKIEEMIISIMTNTSYEELEKEFKEFKNENTKEIESQTEILKNKLDKKKVAIDKATKELEKIFMGESNMDKETINSMIIKLKDEVREIEENLIILKNETQNIKIRNMNTYTILEKYKNFEFLYNKATLEEKKIILQEIINKVIVSEDDIEISLNI

SEQ ID NO: 331 - protein, 478 aa, synthetic construct
MRTAAAYIRVSTDDQVEYSPDSQLKAIRKYAKEHDLILPEEFIFIDEGISGRKADKRPSFQRMIGTAKLKPKPFDVILLWKFSRFARNRQDSIVYKSMLRKQCGIDVVSISEQLGEDNTSILIEALIEAMDEYYSLNLAEEVKRGMNEKFSRGGVVSQPPFGYKMDNGIFAPDKANASVVQMIYDDYLSGMGARQIAAKLNDMGIRSTKGNRFENRTIEYILTNPTYIGKLRRSKNGRDNLDRFHQNAENTLIIDGKHQPIISKEIYEAVQKRLADNKKLYTRYSRHEPVEFMLKGLVKCDNCGATLTMIASHKSLQCHQYAKGVCKVSHCIKIDKINTSVIEKLKSDFEHQSFEVSVESRSPVRTSPDVAAMIEREKKKLSRVREAYEAGIDSLEEYRENKQKIQSRIDELTAQAEVSAPRSEADIKKLISGRIKAGLDILESDETSETLKNMTLRSFVDRIIFMKPKGIVEIFYKL

SEQ ID NO: 332 - protein, 492 aa, synthetic construct
MRCAIYARVSTELDSQKTSIHNQIDLFTNYIAEKGWEITKIYTDKQSGTKSNRPGLKALIEDGKNGKFDVILAKELSRLARSGQLSYKVRDICLDHNIDIVCLDGSINTLEKDDRNFGLYAWLYENESISTSKRSKTAKKTKARRGLFVGSNPPYGYYSDKGVLKVRADETPNVVKRIYNDYIEGQGMDSIAKQLSLEKVPTPSLIANKSNATVYWHASSIKLILSNQHYCGDLVQNRTETVSVTKTKRKPVSKEDMIILEGTHEAIISREVFQIVQTMLKNRMRTKTAPKKHLFTNVLYCSNCGKGMWYKQNQRGYRCGGNIKHGNIFCPNRTIVREKELKYAILNDLNELTNGFNTEDLLKQVEQKLNSKQRKLQNELVQVESKINNWNDRNQKYFDSYCDGIITHEQYEQYSKNNLEKIAQSEAVKAQINIQLEECKNQTFTMDLKSKLKEFASIQDLTTKLLHSLVKKVTCTIDGNVNIHYTFVNPFQ

SEQ ID NO: 333 - protein, 420 aa, synthetic construct
MEKEKLIAIPYLRFSSGRQAQGSSYERQHGMIAEWLQRHPQYVLSTMRFEDMGISGWSGAHLENGFGKLLEAINMGHIPTGSVVLCEAWDRIGRLEPLQMIGILSNILKAGVNIITLDDGTEYTRESANGPHLFLLAAKVQQANLFSENLSRRISESWESRRKKADNGEAIKKRLPVWLAKNNQIREEIAPIIVEAFELYAAGWGERRIRRRIKERCISEDGTILYPELHKVSPAGVQSWWDMKTAIGYWNDIPGVHPAVISMELWIRVQQERKSRYTGPKKSAPSKHPLTGLVICGNCGKNYRMKNDKRKTPVMTCGHRGRLGADACTNGKAIPVDVLEAVMMFTCLDYIKRAVISEHPSLNVKKLAEIEFRLGEVHKQLKSLADTIAITGAIDELVNKAKDLNEEKTALEYERTLLSC

SEQ ID NO: 334 - protein, 407 aa, synthetic construct
MNKIKSCLYCRVSTQNEEQNTSYKHQQNISVKGYDIIKVYADRGTGTNIKRKNFQQMLYDCGVDIKEIEGNVLFIASDRKAMFESIIVTHTSRFLRNQLLMKLCIKALKKKNVEIYFSDMNKSSLDNDIEFVLNILFLLDEQESRNTSQKIKKGLERSRKDKKYIQVPNRLWGYDYIKKENKLIINKDGKIIKEIFDMYLNGLGYRKICLNLKEKYNIEKNSTDIKNLLNNSRYCGYNFYNKWTVSRLDGIKKKNKDYDIFPSDKIEPIVSYEDWCKVQNIIKSKSNGRQGLKHNMYPLSQKIKCESCGCSYVRKREKRGNYVRVFWSCKTKFFKQKGECINPNITERIIVKHLLDKDLGIKSYIRAIELELKKSLNDIKGIDIKEIDDLILKVENKRKKLLDIYTT

SEQ ID NO: 335 - protein, 581 aa, synthetic construct
MLGIYVRTSNAKTNKNDFSIEDQTVSGIKLAKSLNIPYEIYEDKGITGTDENRPSLLRLLKDIKKKKITHFYAIDQARVERKLGVWVLFSGECINHKVEFYLGNQKIELTDPQSMFNANIMSLINSFYAEVTSQKVKSANRLKVSKGKTHGVKALGIGRDENNNFREIPHESKIVREIFDLSINGVGVYEIANKMTARGYITKSGNKKWSGSTIDGILKNKIYKGEFWFSRGDIENRVRYDLDFHIIDPLIFDKVQDFRSNKMIKSGVKNKYSYLLSDKMICGQCGGVHKYVGMHKPSSRTSVYRCSNRNHQVQIECRDSINLTIKKFDTFIVNLIFLSTIFDDVLSKTYSQDQRKKELGNQIKKSKGDLKNLKTRKTKLLNFIDTIDDSQDEDLHERFNNIVKEIAQLEHDISLYKNELLTINTNNPVDEIKEIQQLNYKNISKQQLKDIVNKTINYIKIHSQFSTNEFIVEILFSGFPTPLMFHSTKIMEQFNLLLPKNKIQKNDLLNKLEENHTQKFITPLLENKKFLDLKMNQDDYFSNSDYVDDIALEYEVIKDTPFDVNDYTINLKELQLIDYIN

SEQ ID NO: 336 - protein, 520 aa, synthetic construct
MVRRKARSGNRGRFDSKDALSAGGADVRALRYQRTSQDKKEQGKSVHDQGVLNLAEITKRSWTDAGSFTDNHRSASRRATKEREQFELLIEQIRAGKGDVLVVWEISRKERDLAVFVKIRDMCHEVGLNFWLVGGVLYDLRDKNDRMMLGFQAVQAEWMADSIRDNVLRGIVGAAEAGRPHGKVTYGYRRIYDQRTRALLRQEPDTEIRTAVATDGTVTQYSRAQVVRDNFRKVSEGTPLIAVEAELNRLGIPASEGGLWRRGILRKQVMNPAYIGKRVLRGEIVGDGIWPALVEEETYWSVVRMLGDPSRTTTRPARAVHLLSYLVRCGVCDGPLSSQKVNRHGWTGQVYSCLHKRCAAVKAEYLDEYVQRTVVAWLSRPDVYDILTAASATDEEVAHARAEAQRLRGELEDWRKLGEEGEITAIAYTRAEKGLLAQIAEHEQRAADAGIPAVLRGRIGDEAVQAWQELGDDIAVKREIIRLVADIKLLRAGFKGERRTFGRHRLDWRWKFGPQDQQAA

SEQ ID NO: 337 - protein, 579 aa, synthetic construct
MTKRNPPRAYSYIRMSTETQLSGDSRRRQLELSERYAQQHGLELVQEFRLEDIGVSAFRGANLAVESSLGRFLVSVKMGEVPPGSYLLLESLDRLSRQDVFTSLSLFTDLIKAGVKIVTLADDQVYTSEKTDFSQLVVSLAIMSRAHEESQTKSRRLAEAWTNKRRGVRDKKLTALAPLWLELSSDRTTFRINERRGSVVRSIFEDAAAGLGTFSIARRLNRSAVSPFGRSKGWQTSYVSKILTNRAAIGEYQPHKMVDGRRVPEGTPIKDYFPAVVDEQLFLRVQAARANRRVGGAGRKGEFVSSLFSGLAKCAYCCSPMHYVNKGPGPKGGTYLVCDKFHRGLGCSKNAWRYDHFEASFLTFVEEVDLRPLMHGDEETSNRIRLDQAIRALDDRLAKLEHERSRTFQLLLDPELASDFVRKEFARYQREIEAASAERAALVAEQRLFESDVARFQESTHEIQDLVGQLRKPDGGGDMFRLRSRVAARLKAVVDRVEVAAQGIDLGNTSVLSAGQFSSTGGSLPRQFAVVFRDGGLQRVVQPVKSDPATGETQLFRLIEPRGGWAARAPEESAQVKSG

SEQ ID NO: 338 - protein, 530 aa, synthetic construct
MIGGIYARSSLGQTKQGDTVKHQVQMIQEYAKRLEFNVSFDEKFIYPDDGESGYKTTLLQRPPMKQLLEDIDSGLIDIVFFKGISRFARDSGEAIQTSKRLIQKGVRVISIEENYDSDVSDPTFFQMYAVLAEAESRKTSIRVSLGNKQKSRNGLWAGSVPPFGYIKVKDITDKAKKEELISKGVHPQTLFPHPEKADIIRKIFDMYVNQGFGRKKIVNWVNSQGIKTQYGNKIGDITIKRILMNPAYIGVIVYGKTRYNYIDSDDGLRKIQKVINVDKEDWAICEDAHPPIIEREVFMKAQRLIKQKEKAFNKGRRFNNAKHPLTGLLKCSLCGAPMICQKRTNKKADGTKVTYRYYVCSTYHQKGRDVCPQANINADELEDYIHKQISQQIEKVKNDEYFLEGYSTYNPNEEINSQIKVIDREIEKNTNKSLTLLENKDLYDDQTFRDLNLKLKEEIVRLRKQKDELMDELKFAEEIMTKDDLKAKFDEFLELNLSDISRTREVFHEWINEVRVEDKKVIIDQKFKMI

SEQ ID NO: 339 - protein, 606 aa, synthetic construct
MEQSEIRQTAYSYIRMSSQQQIKGDSLRRQLELSRKYAAENNLLLDESLTDIGISAWTGANVQDGALGRFLQLAQSGLIKRGSYLLVESLDRLSRQQVRNAIGPFIDIINAGVTIVTLADNQVYSETTVDENWTQLMMSLAIMSRAHEESQTKSKRLKEAHANKKKLAAQGIGRYTHNMWGWIDQIEVATNKFEYRLNQHAATIRKIYEMADAGLGQLVITRKLNDKGIPTFRTSKNGWQQPNVGSILRNEAVIGTYQPTHAINGKATPNGPPIKNYLPAAVPEELFWRVQRNKQRRVSSGRKGKQLTNLFTSLCVCQHCNGPIRVRLAGRSGKTHKHLHCDNRYRAVGCPSVGGGFRYDIMEAAILDKIKEFDIDIGTGRQTADRETLLHEIRTKEAQYDEMEKRKNKLLRALELSEDDAAMSDVLSQLSERRIAVEQLATQIAEMKGDLARIAAEEKELASAVERLQMERLIWTTGADEEVYASRSRASAMMHSYIDVIAFDFNRKTYRVSIGGHLILYEFYRDGRLLQKIDNRSLMRKHGVPVIWNDRDETGHAVEGTGEKVIPMGWSSETLTTTIPQSRQDPNAHLVDKRKRIVRTLINKKH

SEQ ID NO: 340 - protein, 600 aa, synthetic construct
MFAYVYARWSSQEQTRGSTLARQLATCGDFVESKPGWTLAETITDKGTSAYTGDNIETGNLGKFRDRILNGTIDPTKAVLVCEELDRLSRQPADVMLSWLSPLVRRGLTIVVVNTGQTITREMLDVDMGGLMMILITAFGSHTESRKKAKRVAAAWEAKREAARTGKSVTRTHRHPKWITVKEDGTFTVLPHHRLIVETIFKNRIDGIGKGLTAKTLNALAQNDPAFAPWPVGMTGAAPALWTATYIGRVLRNRAVMGEWQPFTRPRKGAPAPAGEPITNYYPLVIDAATFARANEERIADALKHQGRGNNLSNLLGTRARCGECGGQMAARGSAAYFTNKKGEKRRHYFLYCQNAKSGGSCENQRGWTYDRVEVPILDTILSLAMDETHFDSGTNLAPIEAAIYTHKGTIADVEHKLANLLDLVESGNKGAAARYAQREAELEAARDALMEAENRLAEAKGRVSPTEHLRRVAEVRTLMWSDDQDVKFQARSKVKAALGDVIERITFHPKTGNVSVMLVEFMRMFVINHAGEVIEDMDLTKMGGGPGHGKVTTYENATVAIGEDGNHTLMSGDAVAVANDLNDDQKLAAVAYMRRKASG

SEQ ID NO: 341 - protein, 510 aa, synthetic construct
MSEVKAAKPKAFSYLRFSTPEQTKGDSFKRQTRMALEYAARNGLELDESLTFHDLGVSAYRGLNAEAGRLADFLEAVRVGLVPTGSYLLVEALDRLSRLTPRKAVRVLEDIVEAGVTVVTLNDGRAYTAENLDDDPVSLLVAIVYFMRANEESATKSRRLKSAWESKRNALDTKPLTAVVPAWIRLDQETGTLQLIPERADIIRRIFEMHQAGTGVALIAATLNREGVPCFGAGAHWHRTYIRKVLSNPAAMGTFIPHRLVYLEGKRTRVPLEPVPDYFPAVVSSDEFSSAQRQVETPARHRAGKVVNLLAGLAKCPKCGSTMTRVNKGSGTKAAKPKLVCTRAKAGAGCEYKAVTLEDVEDALVSSADYLSGSAPSGAGTLDADLAEAEQAIEVTRESIDNLVSVLAATPSQAVAARLSELETALEALNDKRDHLAAQVIAASGPLLVKRLDELEAALSAEPRDNAKANAMLRTMFGSITVDYETGTLEMHWKQGGVSSLTYAWPSAAR

SEQ ID NO: 342 - protein, 457 aa, synthetic construct
MRCAIYRRVSTDEQAEKGFSLENQKLRLESFATSQGWEVVEDYVDDGFSGKDTNRPALQRMFSNVDKFDVILVYKLDRFTRSVKDLNEMLETIKENEIAFKSATESIDTTTATGRMILNMMGTTAQWERETISERIKDVFGKLRENGIFSTGHPPYGYRCSGNKSIEIVEEQAEIVRYIYELSKTMGLFKISVELNRKGIKTRRNNKFGQSAVKRILHNPFYCGYMEVNNKWVPIKNEGYIPIISEEEFKTTQKILTKRNKAQTRSRSVSYYPFSGIVLCPECQRAMRGDRAKYGDYYYRYYRCVYGRENINCTNRKRIRAEQVDKAFAEYISGSFENTTIKLDSKDIKSDIEYELKHLDSKIERLSDIYIEGDITKSKYNEKMNSLLNEKEKLKKDLTSCKENVDAEFVRDQINKLESIWHLIDDKTKSESIRSIFDTIKIKQDKNKVTIMDHTLL

SEQ ID NO: 343 - protein, 564 aa, synthetic construct
MPRAQKAAIYCRVSTLHQVDKDSLPMQRQDMINYAKYVLSIKDYEVFEDAGYSGKNTDRPAFQEMMERIEHGEFSHVLVWKIDRISRNLLDFATMYARCKKLGVTFVSKNEQFDTSTAMGEAMLKIILVFAELERNMTSERVSSTMNARAAEGKWNGGRVPFAYAYDRETDSFSIRDDEAKVALELKDTYLRTHSLTYTARLLNEAGRRTRRGYAWTPATVAIILRSPFYRGTYRYNYRDESEVTFSFKGRNEWIMCAKHHPPLFSEADCRQIDFWLTKNRRQHGKATHVQRKLVHVFAGLIRCGFCGSNYIASIDRVRASGYQPSMYNCGGRRQKGMCKNRYVTDIRIGGFVFNYISNVIRLRDAFRPQWSKARIQRFLLHGDDFCGASLSDDTLRRVRAALLGSRLSTAEYQPADEQHDDSPTQTHKANLQAELEKNRRALSRLMHLFLYAEDEMPQADFLREKKHLQDTITRLQAELEKAQQSSVFTSSLTDEEFLGKAARLLFQSAMVRGSIDFPELAMRVGNLELKNFVNAVIKQIIVLDGRVTQITFANDEIHTFLYH

SEQ ID NO: 344 - protein, 514 aa, synthetic construct
MGFVETPATTPYDGCGRCLVGVRRLSRKTEASHSPETQGDMILAVAEANDAHIIAWADDWEVSGAMDPLKRPKLGPWLTGRMGPYDGIAGAAVDRIGRNVRDVLNTAYTIHENGQMLLTADHEGVWDLDDDTQETELLIKAMGAQLEHRATLRRSTNGKINSRNRGRVFSKPSYGYEYFRAKPMGPVSEVRLRPSSSKEIRKVARRILVDQSGDITVHHEMKRLNREGVPSPQDELAMTYGREPTGVLWSDHSLRRILTSKAALGYLLYKGEPLLDEHGDPIKIAPELWDYSTHLALIEKCRPQPRKTKGKHALGRAGQGKQLYSGRGTCGNCGNKLRASQEGGYHCYARHKGIAPNCKPSPNMRVKLFDKEATRQFLDEFGDAQVMEKVFKPGTNYGAQIAELEASRARLREDRLAGMYQDEDDYDWFKREYQRMGEKIAELKEIPERPFAVITVPTGKTIRDQWESAESLAERQEILSEFGAQVILMSRSNEHRVRLIAVNPYAELELPEAA

SEQ ID NO: 345 - protein, 482 aa, synthetic construct
MRRKKDRSNGITALYERLSRDDDNAGESNSIVHQKQMLEDYAMKHGFTNLVHFTDDGWSGATFDRPSWNRLVEGVKNGEITACICKDMSRIGRDHLQVGFFTDILFREKEVRFIAINNGIDSDRQETSEFAPFLNIMNEWFVRDTSKKIKAVLKSRGSSGNAHTSNIPPYGYLKDPENPDHWIIDEEAAEVVRRIYRMTIEGKGPYQIARELSEEKIERPSYYLGKKGLGNHASNYDKENPYMWRGNQVTTLIARPEYIGKTVNFRTFKNSYKDKKTKRADKEDWVVFDDTQEPIVDEETWLLAQKLRQNVRKADPMGEPNVLTGKIYCADCGAPMYNHRQRKGRERIYYTAKGEKRTSYSNPADCYECSTYNLAYQKYDRHCTCHHISTKALKSIILKTIQETCHYVSLNEREFVYSLQEESAMKDIAVSETVKNRIERNQKRVHELDMLIRKIYEDNVIGRLPDRLFRVCLLIMKMSRTS

SEQ ID NO: 346 - protein, 589 aa, synthetic construct
MNLPATIYARFSNQEQAQGSSKARQLKLCRELIAEKEWLLVDDRILFDEGLSAFSGANRAPGGKLHDFERRAEAGEFKGGHVLVVEHIDRISRQGYDEVLPFVKKMTEAGVTVAVASGRRIYHAYERVTLGAVIEAVVAAELAREESENKSKRLKAAQNERVVAAQKSAANGEHLSKTKTVPAWIDVERISKSSDKPLYRMSLNERRVELLREIFQMTIDGYGTPAIAKNLNGRGEPVWSHLERESKNGWTVGYLTKLVLNRAVMGEYHPMNRPRAGKETSKGIAVLNHFPQAIDPVTFAKAHAARQSRKGVSGAWQITHNNLFSGIAKCAHCGSRMIHQTTVKKGQMRNHKSGRYPAGQTFSYLTCHSALNKVWDKQHKRPKCENVARVRYEHLERSLLEVAMKFAVVRRDVAGDSRNEALRIEIADKQRFIADKQKQVDNLVDSFSRTGSQAIERRMLQLETELITDQAALREIEKGLVNETDNVSIEEYEARLKALLETIDSESEEERTASRIRVKQNLRSIVTRMTCAPDKMTLVEFAGGLRVVFDGEGQQVFNDFINETILGPNGEIDWHPDFPDREYEYAVVD

SEQ ID NO: 347 - protein, 580 aa, synthetic construct
MAKCILLVRVSTDSKKQELSLREQESELFELALSKGYCEEDIIAICKQESALKRRYAKTSEEKDAIEIKQQGLQEMEDMIKNDSSINCVFAWEISRISRREKVLFDELEFLTDRKIQLIIAKPYIELLNSDGSLNPSSKMQFSMFAALADAEMRNKLDRFQRTKESRRKEGKYVGGWLPFGYMVEPSTKKIIINEEEAAIVKYMFNEYLKGGTSIYKLADELQERGIIDYDNRHSAFTFAYTILKNYAYAGLPSTVRQKGKKASTNLYPAIVTKEMVDKTIEMSEQAKTKPKTNVKNIYYCKSLLKCADCERVYVARLNKAVYQCTNDNGKCNNAEISINLADTILWNFAMTLKISQMLHQTEEDKAAYQVQIEVLKQKIEKINIDIENNNKAYSILNKRIIMQKITEEDGEAIEKELDTTKKELEKKLNDYTNKVAEIEQILFNMNTSIAFKHINIDDIADIEDDNLRYEIIHEMIDYCMIEKVADSIIKLELYAKHIDTAYTYYVTTRNRKIYNKDFRIEEAYTSNTTHLVDFKILQRYKRQGKANKEYQKQYYQKNREKLIKQNVEGKRRRKSKPEN

SEQ ID NO: 348 - protein, 548 aa, synthetic construct
MKKELIKVACYCRVSTKADEQEQSFEAQQKYFKEKLSKKKGFDLVEVYADKGLSGTDFSKRDQFNKMLDDCGIIKKEVKARKTEIRKKYISIDYVADANVKPKFTLIYVKDSSRFARNTEVNRIISRLRDKGVYVYFEDLNKSTENPSEKMLIDFMFSMNEQESISRSIKVRFGNMQSAKDGIVRSIKLYGYHYNKEENSLRIIDDEVNIVKLIFKLSLEGNGGRAIATILNSKGIKNRKGNEWRPNTINGMLQNPTYCGKVVRNRWYSSRMYGKDIVKLNDTKEWIVEDSNKVDKIIDEETFTIIQDMIEKNRNKVGRPTGKYHGRSEFAGKIKCEKCGKYYVRNTDRGRVFYNCSTKKQHGLKKCDSRNIQEYEIESLINPYLEKSGYKNLTKKYIDILIEKEEEKKASLYRDACTDEINNIKEEVFKHKGKLSKLTDILLADDSESVRDVFNIKKKEINNKLKELESELDKLTTTDKQKAEKLNNMNMCIKTLQERYNDIPNEITREYFINNCLDEIRVSEKGELKLLTYTHYAFEKIMNLMDEY

SEQ ID NO: 349 - protein, 526 aa, synthetic construct
MKNCYLYRRYSTSKQSKGSSLERQQSLADKWCATNDGQLLDVITDEGYSAFKGDHISQGAFAGVLTAISSGVIPAGSYLLVENIDRLSRQAIGDALTTWMNILGADINIVTLMDGKVFTKESRNDLGSMLTYLVTQERAWSESHAKSVRTTNAIKAANKRLLNGEIARVTRPASWVTYTPQGYVLNEKADGVRRLFELYLSGLGQASTAKQLNDEGVSTLSGRSALWSSASVRKVLLNENVTGVKTIDGQAVIVYPVVVSREDWLKAREQLASKNVGASITVGKVSNPLTGLCYCGVCGDTMHYSSSTSRVGKRYEYLNCASHRRADKCGNVLFKLDHLFEIAKNLAAILCELPVQEDETQRLSAELEGAQLELADASERLAVASTMAVKYPSEAAFAALGTLELEISEVTKRVEKAELALAGAKGVQSAPLVQLSTVRKLQMSEEASRREAAQIFSSSFVSWSFDVNGNSELRTKRHGVIHLDGAGRVLEVRANGLALEGLINRFRAIPFVIDGKQGHITFDRTG

SEQ ID NO: 350 - protein, 548 aa, synthetic construct
MKFNKVYVYVRFSSDAQAEGNSLARQRELAQGYIAKLDVDARDVQWVEDAGTSAYSGAHLHTGELGKLLKLLEKEGAVGKLVIFESVDRASRQGSLGFFKILNMLLEAGASVYFLDQPQQPPFDRNSPAPFYMTYLSLKAEMAFAESARKSDMSKANWRKRRAMAIDEKQPYSKECPRWLKVVDGKYELIEERVESIRRVFELASKGWGKSKIVRYANSSKWPVPGKGNVWHTSLLTRLFDNRALIGEFRAHFLDEQNKVITSEPVENYFPPALKEDVFRAVAMQVNKEARFGNRKDSNSLNYLRGLAKCACGGTWRRLNKNSGKQAGYAQYSCARRVIGLTQCSNISSRNFDYSFIGVACAKIPSLLRMVEGTHHQQMTMLMDKLESVEDRINRLLDLYEQMLMPEVASRLQKARDEREELRRAIKNEELLAPPDASFDFGDALAVYLPAFLDLHGDDEAGMQAHETRLLFRARLLESVKSVSVAADRKAFTVTLATGLQFSEPIYDPSENEDDLGFGPPGDDIDADDLATLEEERTRAFKRLHRKP

SEQ ID NO: 351 - protein, 507 aa, synthetic construct
MTRVAIYLRQSKDAEGDGMAIDRQRDGCLALAEHEGWTVDEDRIYTDNNTSATSAKARPAYQRLIADVRARKVDVVIAWNLDRLTRKPREIEDWIDMHEAYGVNLLTSERRERIDLSTESGRMILRITASVARQEVERKGRRQKESNAQGRSLGLPPVGRRAFGYTPLRAGARGTQATRTGADGLTYPDYGHEPLEAEAAAVRRGFDLLLAGASLHSIAREWTAAGLTTTVGQPWTQNTVRGVLTNPRYAGLVALPRVAGSPGHRASRYDLSALAAGTWEPLVPLETWTAASEVLRDPGRRASSGAPRRWLLSGLAVCGVEVDGRPCGATVKAGATRDKVATYRCSASSHLSRKADVADELVTAVTLARLGKADAAELLTNQEAPDLDALRAELLALQSRLASVAGLVADGTLTGDQARDATRRLKASVAATQAAMSDAGRVDVLGPLVAAEDVAEAWQALDVDRQRRVISTLMQVTMTSPGKGSRGPRDEAGRLEHTSRSVLISWR

SEQ ID NO: 352 - protein, 569 aa, synthetic construct
MTNQKEKIVALYVRVSTGYQVDKDSLPFQKKELKAYCEHVLHVDKKRIEVFEDAGKSGKNTKRPAFERMIEKVKAGKVSHVVVYKIDRITRNLVDFSLMYDDFKYNNVTFISLNEQFDTSSAIGEAILKIILVFAELERKLTSERVTDVMIGRAQSGQWNGARVPYGWDWDAENKCPVHSKKEAPYAKAMYQMYLDGGSSVTIRDYNNSHNIPTKRGGEWTSKTVADFLRNPINKGDYRYNYRESARGKRKADEEVIYMEGVFPPLIDPEIWNEVNRRMDANHTRKNTSAMHPIRKNCNVFAGLIVCGKCGSNYQVTAKDRRRGNGFRPSSYACTGKYQKKHCDNLNVSDVKIGPFMINYIAAIIDASKSRRFIKDTESLERVILSHIDFTDVAGISESSLQDTIDLLYGRSGTETLSGKPVSKDGKNTDTAEKKKELQEKLQKTDRALERLKKAYLFDDDAMDEKEFLEMKTKLEVDKVKLENSIKSLDSSSISENVDQAAFIKSASQFLISHKINSGDYIDYSRLAALDEESMKAFVNSIVDHIVVLDKRITEIVFKNGLTHTLLYR

SEQ ID NO: 353 - protein, 467 aa, synthetic construct
MNAEANDPTIKAAIYARISRDRAGAGLGVERQERDCRQLADRLGWTVAEVYVDNDISAYSGRTRPQYRQMLRDVEAGKITGIIAWHTDRLHRRTVELEEFVAVAEEHGTKVQTVTSGTVDLSTASGRMVARMLGAAAQHEIDHARERMKAKKAQMAREGKYRGGQRPYGFEKDGATVRDDEAEVIRRATKGIIAGRSLRGIADELNAEELTTSTGRSWTYARLRDVLVRPRNAGKLSTGDPGHGEPGILGDAEWPAIVSEEEWTAAYKILTDPSRRIQQGNATRWLGSGIYICGKCGTAMRPAPTRGKYLYRCTAQAHLTVMTEQTDSYVRAVVADLVRDPRIVAALDDDGEEANADRARRAELATRLETFEADYMDGTISGKILRASTDKVQAQIDEIDQRLTASMQRSASSKVTSAEDPGAAFLDAPIDIQRAVLAAVARVEIRPADRAGVRWSEDRVRITPADN

SEQ ID NO: 354 - protein, 608 aa, synthetic construct
MSMNGPKIYPYSRISSSKQAKGQGLTIQQEDSLLQELSERYQLPVYEHRMVDSGKSAFHGDHIKDGQLGWFLNAVRSGEVAEGSILVVSSLDRFSRQEIRKATSDLAGVLSCNIGIYSAIEQRMFCDPYGDKSSNVLDIQLAVMILERAHGESRTKQARTLKLRDLAIGRHLNGERHPSGYAYSIKVVGNDVWWVDNSDGVVRPHPVYIHVARQIALRLMAGHSPRKVTDWLNREGPDCPIERFDKRAPKVWSHHVIRRFHLSRALVGEKQINDIILEGYYPPVLTENEYAALVDARTRRKRPRTTGKATAISLFAELPQATCRHCGASIHMNRETGGALNYRCSGFREEYRCLGWSKRAAVIEKALLDICLDKVWKDPETLPLSRVPALQAQIDKINGHIHNLMEQAREKGFPKILTLEIGRLESQLNELSTQMESAKAEEVALQARTCASLVPRWGAISDRVLDTKNDDARIELRELLRDSIASLTIGRPGLISLRDRLALLSDPSKSIDEKKSLLAEEVPRGPERFIFVMDVTFNDGAHRCVTMDRHGVTAIVGTDRSSLGTDVAAKLGSVPTRIFNAYAPDEIDEELMAELETLRRSDRNAIPE

SEQ ID NO: 355 - protein, 557 aa, synthetic construct
MYITSSNKLFCFSFKYIRVFKYNKGFYNNTHAMQAVYLYIRVSTDEQAVKGYSQRSQLDRLVHYCKDHNLIVTKTIFEDYSAKTFNRPEWNKLFAELKLTKNQSSLILFTYWDRFSRNIMDAYKMLERLQNMKVSIQAIEQQIDFSIPESKIMLAMYWATSEVENDKRSRNVRLGMQKARLEGRWINKAPLGYRNKITSDGKKYIALYEPEAYIIREAFTAIVRQNKYCLTEIYKDALSNGLHCSRSAFYRLVRNPIYCGKIKIPAFEDKAERIVEGAHERLIPVVLFDQVQRIIKGADLNHSKKLTSKRIVNENLIFRGVLQCPNCGNTLTGSGSQGHTKKYYYYHCVGLCSYRVRADLINLSFLSFLKNNRVVEPFLELANSISKEIYGEEHHDYIQKKEEIKKEMEKLIDRGFNAQKLFSNGNIDYDDYILIRSRCQESLKDNTDKLRQQALKIVAEKHTEKGTDYIINHLGEFYENSDTITKQRIIRLFFSEKVKVIEGNIEKMLSESVKTIFGLTASASKIKEIHGQQTEQEIVEFFKELYFLGYEQNLKNI

SEQ ID NO: 356 - protein, 555 aa, synthetic construct
MLNLRNQNFKVGMYIRLSREDGDKQESESISNQRKILQRYVKENNLNCVKEYVDDGVSGTTFDRPGFKEMINDIENKTINMIITKDLSRLGRDYITVGEYTEKYFPQNNIRYVALTDGIDTYVDSTNNDITPFKAIMNDMYAKDISKKIRSVLKEKQKNGEYMCSIPAYGYKRHPTIKNKLIVDEQVRYVVEKIFDMYANEHGSVEIVNYLNNNHFLSPTGYRKTGLIQDKNKNGYNWNEVTLCNMLKNEVYIGNTIQNKRSIISYKVKKFKKVNKEEHIRVDNTHEAIIDKNLFEKVQCIFERRGTNSKLKYDYLLRGLLYCYHCKRKLQIVLKKNSKRKAKAHPYITCSDAKERGCYPLNMSYEKFEKHIVYIVKKVCQIYTDKEIFYSIYEKYQNKTLDIREGYKRKIEKINQTIVDINNNLDKMYMDKLKGILQEEDYVRVSQKLGSERVKLNEQKQELEQKLIGVEDKIENKKQKEEEKELDKLIEEFLKFEKIDKIFLYRLINKIEIDKDKNIYIYFNFSKLNSITENLDEFIKIEEIIKENGKTSKAV

SEQ ID NO: 357 - protein, 549 aa, synthetic construct
MARVLGVVRLSRVSDETTSPERQRRSIQRWADQEGHVVVGWVEDIDVSGGVEPWKRPEFGKWLPSTIGKEVSAIEHKIAMEESRADEYDILCALKIDRLSRRVLHVHTLLEWCEKNGKEVATVEDGINLNAQMGKLLLSLIASLAEGELEAIKARAKSSYNHLVKEGRWRGGRTPYGYREEKQETGEGWKLVPDDYGTDTARTLREIVRRLIEGESANSIAQWLNEDTSKTPTSLDAQMIRSGKTPKGSRWTAANTSKVVRSRCVLGQMEVTEEVMVDGKKVKRTRVVRDTDGQPLQRAEPLITQEEWELANKKLDENTSQRNGNRKGGSPLLRVAFCTCGEPAYLGPGRNWPYYRCASRTTHKPCPTGSKGIAAHTLEDAVEKAFLLAAGDVEIVRKVFRPGVDYTRDIEEVNRALADLREDREAGLYSSELGKQEYRETYKRLDARREQLIAQPTRPDTWEEIPTGETYRERWSKLSTQHEKGKELRAAGAKAVIHAEPIRGMTAAQAMPVDGHDGMWQHSVGRVQVLIPMDFKQRVRNMAAIRSED

SEQ ID NO: 358 - protein, 620 aa, synthetic construct
MLLAVGNWDHCKILRSLRSEALLKKPLAYSYIRMSTDIQLKGDSLRRQTERSKQYADEHGLELVEDFRLEDIGVSAFKGDNLSSGALGKFLDAVKAGRIPKGSYLLVESFDRLSRQKLNASVALFFDITSNGINLVTLSDNQLYKAGEAEFAQLIMSIVVMARANEESEMKSQRLSAVWDAKRRAVSEKKLTGLCPAWLELSEDRKNFHVIDDRAQVVRRIFEDSASGQGSFVITRRLNDLGVPAFGRSTGWVQSYVTKILQARAVLGEFQPHTKQNGRRVPLGDPIPDYYPQIVDENLFLRAQFARGKRRIEGGGRKGEALRNLFTHLATCGYCGSPMHFLNKGFGPGGGTYLKCSHALRGLDCVPTTWRYQDFERSFFLFVKEIDLAEILRSSSSKSEVLILDERAVAMAEKKSDLELKRERTYSLIDDGAISVEFLTTKLRECEADLAAIELQMADVDRQRQEIREQQAISPDELRLLIDQLQRTEGSQAFSQRSMLAARLREIVSDLKLEVEGSLPRQAKAAALLDAADIEPQERSRILDLIEQSNIQAKRYNRSFTVVLTDGVSRRVVLRNDDPTDFVAEVLVDKDGAISGSDRGMPIGWSDGWDNVFAEPASAQ

SEQ ID NO: 359 - protein, 553 aa, synthetic construct
MKQQLAYSYVRFSSPQQAKGDSFRRQTKAAREYCDKHGLQLADLTLHDLGLSAYSGTHYEQGALGDFVRAVQQGKVAQGSYLIVESLDRLSREEVDIAFSRFASILRANINIVTLQDGKQFTRESLKNTTDILTSILVMLRAFEESDIKAQRIKAARDEKHRQARENKKPTGYRPPDWMKLENGSYQLIPERAGIIKRIFQLNNGGLGAIAIARLLNEEQIPAWGRSKTGWQTSYIKKILKTRTVLGEYQPHVMVNRVRSAVGDPITDFYPPVIDPKTFKLAQLTMTSRDKRPGGIRNSRMTNLFTGLVRCKHCGNTMHFVDKGRPPKGGQYLLCSLAKTGATNKDGVSCKRASIRYKETENAILTVAATLNLRVTKPSNEAEVSHLKENLSRVNAELGTVENSITRIADAIAALPDSSGLLSKLVELEQQKQDKKNEYQALEKRIDEIELTPKSSNVWKELKSTLRTLRVEAANRANVELRAKINSQLLSCIDRIEFDNHAKVVTIHIDDYRNIEIRFEDKMKSYTVKPSWDSREFPPNTFMIKSVVDTKRV

SEQ ID NO: 360 - protein, 476 aa, synthetic construct
MEVAAYLRVSTDEQAESGHSLLEQQERLKAYAKVMGWDKPTFYIDDGYSAGSLKRPQLQKLIRDIENRKVSILMTTKLDRLSRNLLDLLQIIKFMETHDCNYVSATESFDTSTAAGRMVLHLLGVFAEFERGRTSERVKDNMTSLARNTNIALSGPCFGFDIIDKQYVLNKKEAKYGLKMVEMTEAGHGTRSIAQWLNSMNVKTKRGKQWDSTTVRRLLRTETICGTRVINKRKKVNGKTVMRPKEEWIIKENNHEGFISPERFKNLQNILDSRKINKQHENETYLLTGILKCGYCGGTMKGSSARVSRGDKKYEYYRYICSSYVKGSGCKHHAAHREDIENAVIIQIESITNSSNKELQLKVVTSNEDEDVFELKRALESLNKQMMRQIEAYGKGLIEEEDLERSNKHVKEQRQLLRNQLDSLEQFNTPKALKEKAKILLPDIKSLDRKKAKTTIAQLIDSLVLTDGELDIVWRI

SEQ ID NO: 361 - protein, 587 aa, synthetic construct
MNHKKAIAYIRVSTTHQDVERQRIKFKEYCKNNNLQANEEIIDFGISGAKSDRPGYLRLQALTGKDADILVVSELSRLSRQEEILETINIIQNIVYNGLSLIFLDAPSKVYEAHSTLDITELIILLVGAFRAAQDRKEIKRKNQEGKQALLSQNPYAVVDAKIPYGYNAIYNPNGSRPKKILIENEEEVANVKKIFQLALEGYSLGKIAKYFNNRNILFRGNFVTRQLLSVLVRNILYKGIRRRIHSFDRKDNPNIIENKITPIISESDFERVNQMLKDNHKFCSTGNNYFNTLRGIIKCRCGRGMMVKDKGYASGIKKMVYRCNDVSAKDNPIHCQYKDEISYQFTNEVIFNVFKYIHNTDEIFIFMAKTEQKIYEIDEEIKGIERKIENKNIEIESLNKDNKRLIERYIHAKSQSIANAIQDEQLTIENKIHKLEDEISHCNKEKVKLITNKESLINYIDTEELSSLGNEERAELFKKHLEKVIYLPVTLMQGFYIITFKSKMQRIVAIRKTAKSPIAAILPDGYTVDMNTKLITEYYQSIQTGGCSYPISSSFKQLTIQEYFKKLPQIGNLGILEIDYSYRKGK

SEQ ID NO: 362 - protein, 455 aa, synthetic construct
MATALYLRQSFDRTRDEAAIDRQRAECRALAERKGWTDLREYVDNDRSATNTKKPRPAYQQLLTDMAAGHVQAVVAWDLDRLHRRPIELETFMPLADRMNVKLATVSGEVDLSTAQGRLTARLKGSVAAHEGEHKAARQRAAAKQMAERGLPKWKSAFGYTDDHQPHPVESELVRKGYETILGGGSLSGLAREWNAKGFYGRNGKPWTASTLGLFMRKPRNAGLRAHNDVIVGPGSWPPLVDESTWRATQALLDDPARKPGPKTVRKHFLTGVLRCGKCEDGGRIGGYQGPRGQERYRCWKCLGVAISKPETDDYIRGLVAARLAREDAKQLLIDQEAPDLDRLTSEANTLRARIDELAVAFADGDLTAGQVRTATQRLQAKLTAAESRMASASAKLVFTDVPLGTERVHAAFARMDLDRQRAIVNTVLTGTVMPVGKRGRVPFDPERIAIEWRR

SEQ ID NO: 363 - protein, 571 aa, synthetic construct
MARLISYLRMSTSEQLRGFSLERQRKLIADFAAKNGLSVEEENTLEDIGRSSFSDDAQQKELTRFFENLNAGKYEPGDVFALENIDRLTRRGPVDAILKVNQIISKGLKLAIISGNEQRIIEDVNDVFTIINLSIDASRANKESKNKSDKGLSNWQEKRNLASTHKIAMTAQAPAWLDTEIFYIFDEEKKKNIKRRKYVLNEEKAEAVRLIFDLYSSGNGALKIKNILNERNIPTFKGAEYWEPSIITKILKNPATFGLYQPKKQGTGKRDLIAAGEPINDYFPAVITREIFEQCERIREGNGTRKGRKGKLFTNLFTGLLTCSKCGGPVHLINPGIDKRNKVQKSIYYLVCKRAKFTKECTTKRVRYDDFEIALLKAIQEINLADILNENNPLEILVKKHRSKETEINKKKKLIENFQRQFLENDGNLPSFMISEANAAEISIKELEEEQREIASEIAQLNVYNSNVDNAIEELKEKPDYETRSKINLLFHEIIKNISLDTENQFYTVRFKNGVMRVITAAGFIATTEHQTTAEMAEIMRIEGTQDIPAEIANDPEKLIEYLRQFDFIDQ

SEQ ID NO: 364 - protein, 521 aa, synthetic construct
MENRVYCLYRVSTRKQVDFKAENQADIPMQRKACREFAGQMGWEILYEGQEAGVSGFKVSEKDRDVLQMIKEYALQRKFDILLVFMFDRIGRKADESPFVVEWFVRHGIRVWSVKEGEQRFDHHIDTLLNYIRFWQADGESRKTSVRTKEGLRQLVLDGGYRGGGVPYGYRLVATGRLNKRNKEISELAIDSDEAMVVRKIFDLCIVHGYGRCRIATELNRQGIRNRKGENWHEASIGHILHNPCYTGVLRSGDAISQRFEHLMILTPELFEQAQALQKARQNEADGERTVPVNVTGNSLLSGNIYCGHCGGRLVLTSNCKSYVTADGNKVKHRRTRYVCYQKTRHRCVCDGQTGYTAHILDEKVEHVICRLLEQLGAVEESFLLQGYLLCEEKQLRRKIRDAAHEAERKKQDYQLLKQELQKSLHGSSPYPAEILAEMLCEAERNAASAVTYLTSLQSQLSLLRKKDMAQQDEKKIFWVDIYRASPIEVKKMIVCHLIPKIHVYRGYRLELEISDIGVVL

SEQ ID NO: 365 - protein, 524 aa, synthetic construct
MTKKCFPYVRFSSAKQEDGSTRARQNELIEAFVAKHGLEIDQTLEDAGTSAFRGLNASKDGVLGGFLEQVRNGEIEKGSYLLIENFDRLSRDKIVRSNKIFSDLLFAGIKIVILDKNKVYDADNLDFSEWIIALVEFERANKESERKSDFSSKAWRYNREKMQSGEIVTKKVPNWLSVEDGVFIVDLDKVSRITHLFNLSLKYGLLEATKRYNQEYADKLAPHQVQYILGNRKLIGEHQPKKLYWEDGGKRRLKDEGNPIPNYYPAVIEQELFYKVQEIIKGRKPFTGNYNKQQYNIFRGLIYCRWCGGTIRYMNKGERDYFICTNSMGHKCMAPGQQSIRGKKLFSLFFQFTDKLNIQSLINESKDYTAIKTNILKVENDKKRIQNRLDDFKSSLKKMILEQQSVPNSFYEVVNDLESDLASFEEKSKALNEEYKQATQSYNALLEVEHIDIESIIYDRSEAAIEKRVAYNSTLKHIFKGIAIDWLGGMLVLEFKDGTERYLKEGQRVPVDIPTDFDEVLDIE

SEQ ID NO: 366 - protein, 605 aa, synthetic construct
MKKAYSYIRYSSPQQAKGDSFRRQFSATQAYCDKNGYELDTELAVYQELGVSGVDGDQENLKRFIDDCETGKVEKGSLLIVENLDRLSRKKINKAMRQFLHLLDFVDIYTLQDQKLYSQNDDVDSDTQLLDVMTSLIVMSRAYEESATKKKRLKESWDSKRKNINSKKLTSLIPHWLELSEDRTEFHLKKDKIEIVKYIYQKSIDGMGVSQLIRHLNENLTQFPTPTHKSKLWARTSLSRILTDRSVLGEYQPHVGKHNGIGENKRKPLGDPIPDYYPQIIDEETFLKAQIARKSRVIGRGKVNRNKFSNLYRNILRCGYCDGKIEYVDKGDGSRGGKYLTCSNAKRGGKCSHNKHYKYLPLELMLLHLTTENGFMPKPEAPTDLNLRLSKLQDLNEKAESKLSFLLEEDFSIPTIREKTRELSKEIERYRSEIEELENKILTFKPDYTYSDLYQNVILEKDSVLLSSNRMTYNSYLSKKIESAYLFNDYSNFILFKMKDKHVHTVMIDEQYNFGGCSLPNNNMTYKRLNGDRTPIDEMIWQIQQNFLILIESCKGLNNKKLNNYLNRINKLISKIIIDQEIELFNQVLFQIEKATKLLNKVQNG

SEQ ID NO: 367 - protein, 545 aa, synthetic construct
MNKYHLYQRVSKQIQAEEGQGIQRQEQACEHWISDYNKRLLSEGKSAYSKGLIYEDRGKSAYTAANFKRGELGALINDIENGKIEKGDLIVIELIDRFSRANVDFVRSQFQRIIDAGVKIAITKWNLVFEENMESVSSVTGRILLEIGMYLAYQESSQKSSRIKASRKLLEDSGRKSIAKPPFWLARNSDLKSYTIIEENAEIIRKIFDLKLNFNYGPQKIIKSLGDLDIYRYSFDENGNLIKTTKNSPLSESSINAYIRNTNVIGKLDGKDYYPRIIDDRTFYAVQKRTRENTGGVGEIFRNVFVGVGKCGCLIRKENENGCGSLAKCGYIMAFSSRKVKNPTKGMYLKCNRKRKSTKCDSVNINYYLAQNKIYNVLKSLKFDIDQSVDISHLEEKINTIDKSMSKIREYMTQYSDDEEWENQYKIKRMEREKIENEIKASKSRITGKLSNLDIDFSKEKDRVLFNQFLKDNRITVYFTKERMEIIIGSLNNFSIKCGYDDSNRDIDHIIESYSKNGLVGIEEKSGKSEGKGLLRFNLPTVPGS

SEQ ID NO: 368 - protein, 511 aa, synthetic construct
MDRVCIYLRKSRADEEAEKYGERETLEKHRKILLKVAKEMSLNIIKIREEVVSGESLIHRPEMLELLKEVKNKEYDAVLVIDMDRLGRGNMQEQGLILDTFKESKTKIITPRKTYDLQDEFDEEYSEFEAFMARKELKIINRRLQRGRIRSVEEGNYLAPAPPFGYQIEHDGRIRTLIPHPEQAPIVKMIFDLYINHGMGGGKISNKLNELGYKTYMGKNWSSSLVLNVIRNEVYAGKIQWRKKEYKPSNNLSGVEVKKLPREKWISVKGKHEPLVSKETFKKAQEILNKRSHVPYNTRITNPLAGLIICAKCGTSMVYRPYGKIDPHIVCYNTNCDNKSSKFKFVEEKLLEGLKNWLEQYEAEWDRFQSTENLCEDNNIIKMHKLALNRLKNELKELETQKNNLHDLLERGIYDIDTYLERSQSIAERIENTKLSIKNTSKTLSLEEQSMNAQKNIIPTVKKVLDLYIKTDNAEQKNNLLKTVIDKAIYNKEKKQRNDEFTLVLYPKLQK

SEQ ID NO: 369 - protein, 511 aa, synthetic construct
MIENYLEKIKQRLKVVVLHAVIYTRYSSDNQRSESIDAQIRLIRKWAQEHNIIIDKVYADEAQSAKRDDRQQFQQMIADSKKQKDWQLVLVHKLDRFARNRMDSAAYRVELRKNKKYLISTTEQFDDTPESCMLEGIIESMAEFYSKNLARETMKGLTENALKAKHCGGTPPLGYDLDENKNYKINEFEAQAVKLIFSLFLDGNSYKTIIYALNEQGFRTKKNALFTQNSLYEILRNEKYTGTFVFNKTQSRDEVTGKRSRHQHKSAEEIIKVENAIPQIVTHEEFKRVQEKLNSRRNAYINNTKELYLLSGKIQCGICGGKFVGSRRFNNRGVKYVRYICNINHRSKEQRCNNHSIKRDWIETFVLNKVDEYIGQLTYKKKQSIYQFCWNSIANSNQPKINALNKEVRKIDKELLRISGVITLINSSTLIEKLTLLEQQKEEIQLRIKKLSKEERKNLSEEEIDLLLLKLRKMLKEKSIPQLKELMYLIVNKILVNEKDVVVYLNIPNLK

SEQ ID NO: 370 - protein, 588 aa, synthetic construct
MKRAALLLRCSTDAQDYERQKLDLLDTIKGMGYTTSDDLVFGQYITGKDDVRKKDRESVAECKQAVREGKVDAIFINEVSRLSRDSIAGRLFIREFNDEYKIPVYFRDLGMWTINPTTRIVDRSFETMLGFHFDMAQNELKSMKTRFASGKRKNAREGKTIGGAVPFGFYKDEDGKLQVDEEQAQVVRLVYNKYLEDGGSIPSVCRYLLSCGYDKKFNKKFGTGSVRNLLRERRYIGEQRYNLVNPDEPDEAKKQEVYIYKVDAIIDTTIYNKVQIKLDKNRTTETKKVNKDKKIHLLAKLITCPICGDSYTSKTASANKSGERYRIWNYCCVSKYNFSECTSDITLNADNIESIIWQLTKREILALQELSLEERQSKIDEAEQKLASYKDELDVIAKSIDKLNVKKKKLVALFLDIEDDDTAIFNEQREAINKEIDSYNNRIQFLNTEITICEGNIARFKESDFTDEVLDKIEQDLLKKKELIKEYIKVIRPYRLTKARLILEVESKQTNYCILFEPRNSKRRCWYIQSSLAQWQNGLLKTSTAPLGNFFYIPMASLLLDEPDDLDAIASFEDMKEICRINNYVIEY

SEQ ID NO: 371 - protein, 430 aa, synthetic construct
MAKIKQQDRITALYCRLSRDDEYSGDSASIQTQKSILLRYAQDNGFLNCEYFVDDGFSGTNFNRPDFQRMISLVEQGKIGTVIVKDLSRLGRNYLMTGNYTEVIFPEYKVRFIAINDGVDSACGDNEFAPFKNIINEWYAKDCSRKVKSAFKAKALNGEYTGGYPAYGYRKDPEDRHHLVPDDHAPIVRRMFQMALEGVSCFHIAKALEEDEVPTPRAYLMDEFGKYKANERVKHPYAWAKGTVYRILSNPIYLGKLVSLRYQTRSFKDKRIIPRPEEDWITVDNTHEAIVDQATFDTVQKRISIKQPATWENSDNKFRGLVFCADCNTRMVFSSRTGRKSKGHFCCNKHRRYGGKECSAHYITLEQLEAILLEDIRRHASLAVEDTDVYVDYLLEIAESGASGKKSAYKRDGHTQKTAGGTERHPHTVV

SEQ ID NO: 372 - protein, 536 aa, synthetic construct
MTRSAPTPLRCAIYTRVSTDHGLEQDFNSLDAQREAAEAFIRSQAHEGWRLLPQSYDDGGFSGGSLERPALQRLLGEVEAGRIDIIVVYKVDRLTRSLTDFARLVERFDARGASFVSVTQAFNTTSSMGRLTLNVLLSFAQFEREVTGERIRDKIAASKRKGLWMGGPVPHGYRVEARKLVIDPQEAQTVRSIFTQYQELRSIPALQQALRLQGIRSRVRMRTAGTSIGGVPLTNGPLGHILRNRIYLGEINHRGNSYPGEHEAIVTTEQFAAVQAIMAANTVKRRSLRVTSQALLTGLLKDDRGHAMSPSHALKKGARYRYYVSQALLQGRKAEAGSRPRIAAEPIESIVLQHLRPLATMRPPADQQPPRSDAGLIEELVEQVVLGSSEISIRLRAEAGPAGQPRALSIPWTPPSATRRREVIAVAGLGEGRAAAPMKAENRQKLIRALAQARAWLAELTRGEAIDTAGIARREGCSERAVRMRLSLAFLAPDIVEAAIAGLLPRALGLTRLSDLPMDWAAQRRALGIRDTIAAN

SEQ ID NO: 373 - protein, 632 aa, synthetic construct
MQQTKGNKAYSYIRISSKKQLDGYGIARQTAKAQAYADANGLDLDKELQDVGSGFHGEHVKFGELGGFLKLVKEKKIPVGSTLIVESLDRLSREDVLIAQRQFIDILLADITIVTLMDNQVYHKDRDFTQLIFSLTIMQTANEESSKKRFRQEDNIRKNKLAALEGKSVYNFAGVTWIDQIRVSGKEYRFELNDHANTVRKMYEMYDSGIGVHSIVRYLNENSYPIFKDGANKNKIWKDAAVRRILRDEAAIGTYHVLETVEGKRVLMGDPLVNYYPAAVNEELFWRVQRRHTDVSIPGRTGRKFSNLFATLTKCSQCNRPLRLVQSGGTFTGGRRDNLFMCRGRFERGLETCDSKPKSFPYDALEQAVLTHIDDFTLDVEISGGQNRKTDGIRQEIETAERKVADLSDRRAILVDTIEITKEREERREMSERASALRREIEGIKAKINENRQLVREIEDDSVEIKTVADMIKSEHLTWQTGTDDDVRESRAKVSLALRKFVSRITIYFSHRYAEVTIAGGLKRYHFDRSGTLQQVRDLTPYLRPQMPRYWIERSSDGRPLAVHPYQPKIIAWEEIKLAMLADGYDEQTIRFAKENFDRLKIEQAEAPKINPRLNDPAVIALKARRKAAIRS

SEQ ID NO: 374 - protein, 477 aa, synthetic construct
MMDRNKVAIYVRVSTQGQVDDGYSLDEQVDLLTNYCKLKEWTLYDVYVDPGISGKNMHRPEIERLTRDAKRKLFDIVLIYDLKRLGRSQKENIVLVEDVFNPNGIRLVSFTENFDASTPVGKMVFGMLSAYAELDRANIAERMMMGKIGRAKAGKAMSWGMPPFAYNYNKETGDLELDEVKAPIVEMIYSEFLKGASVNKIVQKLNSMSYHGKNHEWKHHAVTVIIDNPVYCGMMKYMGQTYQAKHTPIIDKKTFELAQLERKKRLSKYHDADWLGPFQRKYIGSKICYCGLCGAHLKSEKDKKNKLTGIRSISFFCPNTRSRGTGECTNPRFKQSVLEGYILNEVAKLQQNPEKLKDIKPAEDNELHNKIATYEKKIKQNSSKLSKLNDLYLNDLITLDDIKQQSKSLLNENEFMEEQIKLLSATTREDELRKKIDTFLAFPDILTADYDTQKQAVELVISRVEATKEGIDIFFNF

SEQ ID NO: 375 - protein, 507 aa, synthetic construct
MTHALPQRAGLYCRLSYAPDGSLEKVERQEADCRELSQRLSWPVSESHVFVDNSRSAWQRNRKRPAWDAMLQALDAGEIDAIIVYHGDRLMRQPYDLEKLLSVAERKGIRLASPSGVRDLDSPDDRFILRIEVAQACRESDNTSRRVIRALRARAEKGLTQVGGSRPFGYGLQVATRTVADQETGAAKEVPVYDTTQQVPEEAKLLKDAVDRLLAGQTQIGVVKWLNTQCTTTEGNTWTTKTFRDLLLRPRIAGLIEQDGLFMDAAWDGIITAERWQDVKALYQRNGEKYRYAGRDRVHLLSTVAECGGCATVMRGRPVGGKDKPRRRTRYMQYYCPGCKKVSRKTDAVDAYVQGRVLSLLQDGRFVAELRAAMETGAPGISAQITELEERKRKRTAELEELADDPDLDPVLAMRALASFDRRLAALRAQLTVSVEQRTVQRCVGMTREEWMAEPVDVRATVVKSLFRVVILPTSRRGPGFDPSSVRLTRRSLEAPAETGDQAASRG

SEQ ID NO: 376 - protein, 556 aa, synthetic construct
METKKGAIYARVSTDKQEYTRQLEELKEYANRNNISIEYIFEETESGLNSERPEYNKLINLTKEDIDIVLIWELSRLSRKSIEIQTDIRNFKNKGINVFIYDRGISIFDSNGEENSFINMLIGMLSAVAEEEIKTMKKRVVATKRHNVFMKGYSYTSHPPFGYTRVEKKMVISEPEAKIVKEIFDLSINGSSQYSIAVKLNADGVPTTSTKNALWSASTVSKMLQNTAYYGKAKYLDTFIDCPAIISKETFDLSQIKRKQRLTRSATKVGNTFLLRNLIKCKHCGTYFTNAKDKIHHQYKCTRLMNRTFQESKCTSPAVNFHNMNYLIWDIVSRYFREVYVDDRKRNNEANLLEAIEDKNRIKQSIDNEIKKENKKVGIIYSGLQELKIEFPDLIDLQEREKKKLSNIQSNIKRLNSEKEMLDNEIASLKSRMKDLSDVENMDLTTLDYNTKYDFLHRFIDYIYITKNVPDKSKLYYGESDKRYKVEIFLKSGNKVECKYHPQKKEYTINGVVNDMSEVPDGATAYQVTDKTILIEQTIKFPSVVPKIEPETEKAG

SEQ ID NO: 377 - protein, 596 aa, synthetic construct
MATNKKITALYERLSRDDEMVGDSNSIINQKKMLEDYANKNGYTNILHFTDDGYSGGSFERPAWKKLIEGVESNIIDTVIVKDMSRVGRDYLQVGFYTEVMFREKGVHFIAVANSVDSNKTESAEFAPFLNIMNEWYIRDTSKKIKSVLKTRGLEGGHHTSNHAIYGYRKDKDNPSKWIIDEEAAEVVRRIFQMSLEGNGPYQIAKILTEEKVERPSYYLAQRGMGNHISNYNSTEPYLWRGTTISNILSRPEYMGHTVNFRTYKESYKSHKSKKTPKDEWVIFENTQEAIIDEETFNTVQKLRKTIRRTDSVGIANPLTGLVFCADCGAKMYNHRGKAGFKRDWLGRKTDKRRPLKDEYICSTYNLARGNFEEKCSSHYIRSEVINKLVLDTIKEVSEYVKLNEEEFIKKVYRASKEQQEKTSKLLKKRLAKEEKRISEINSLIRKLYEDNVSGKLSNKHFDMMLKDFEKEQTALEKSIEQTKDTLRDFEEDSIRADKFIALVKKYTDFNELTTQMINEFVDKIVVHEGKWENCERTQEVEIYLNFIGKFEMPKKEPTKEELEELEKLRKKREKKREYNYRYMKKVKDRIEAEGI

SEQ ID NO: 378 - protein, 515 aa, synthetic construct
MKPVRVLIALRISNETDASTSLERQLQDCTSYVNERQHLGWQVVGVARDAHISATKSHPFERPELGEWLNNRAPEFDLLLFWKMDRFVRKVVDMQDMIKWATAHGGKALVSVKEPVLDMIGPFRHVIIDLFAAIAETEAQNISMRVKSFQSYAKSKNVWAKGNPPYGYESFRDTDGAMRLQVRENQRQVIREMHKRVVEDGEPYSTICDDFNTRGIPSPAGERMSDRRKKNGTSMPVWRSRTITNILRSEAILGWKCEEVRAPGKKYGVSQAILTSEGKIRMAEPILTEDEWTKLQDEMNGRPGAARRSTKNTTTYRGVVLCGGCGKNLYLFKPERQQGKPVYRCNKSANRDSCGKGYAFRAERVEELVETMILGTIGDFPMHERHYVKGSNNSQRLQEIEEYVTELQRSLRPGGKNSSGFAKKATEEEIAALYEEHDSLTAEGDKPDRYEYRDTGETFRHMWERNKGNESERARHLLKAGITIRLNPLTKGVSNTTDFGAEVDLGNRSEPFTIH

SEQ ID NO: 379 - protein, 455 aa, synthetic construct
MAGIYTRISADVQGDALGVQRQEADCRKLCEQRGWDVVEVFCDNDRSAYSRKPRPRYNDMLEAIRDRKINAVVAWHPDRLHRQLRELVGFIDVADEFGVHVETVTAGKYDLSTASGRMQAKMLGTVAEFESEHKSERIRRKLEQNAANGIHHGGSRPFGWLEDRVTLDPSEAEVVREACQLILAGETVKGIARVLNERGYRTATGRPWRDVTVRTTLLRPRNAGLRLHHGEVVGGGQWEPIIDAADFHQIEAILKNPARRTNPGRNGRVHLLSVLALCGVCDSPVVVAQGKKYKGVSKPIYRCRAAHVIRDQASVDHQVTQLVLARLAMPDAAGLLAEPDRADRAHAAAVKVQELQDRLTDAAEAYAAGTISLGQLTTINGAVRPKLEEAQLDAASPDRAKVLGDLVAAEDPATVWVTMSQEQRRAVIDLLVEVRIMRTTSGPHYKPEAVKIRWK

SEQ ID NO: 380 - protein, 589 aa, synthetic construct
MYNKTDRITALYCRLSNDDERDGESGSIKNQKAILEKYAKENGFTNCRVFVDDGWSGTNFARPAFMEIMELAEQGKVETLIVKDHSRLGRNRLIVGELLEEQGKVETLIVKDHSRLGRNRLIVGELLEETFDELGIRYIAIMDNIDTAKGISDLVPMQDLFNEWHAKNTSQKVRNVFRNKGMSGKPVTTNPPYGYMKSLEDGDKWIIDEEAAEVVKRIFKLCIEGYGPTQIAKLFREEKIMTPVEYWATHGRIGGRFPSKPCNWCATSVGKILDRQEYIGDTVNFRSKRKSFKNKKKIDNPKDEWVIFKDTHPAIISEEDFLLVQKLRQNKRRPNRKGTISMFSGLMYCADCGAKLYYVANRKHETPSFVCSSFRKDTSDCSMHFIREKVIYQAVLQDIQKVFQYISDYEEDFARGVLSEERYQKKKELSSKQKELQKSKHRIEEIDMLIQKSYEDNATGKLSDERFATLSLSLEKEQRELKESVPAMEAALKEETDKTENVQQFIDKVKKLSEPTELTNELVHEFIDKIVVSKPEKINGKRHQHLDIYYNGIGIIDKMTPDEFATKYLNGEIHRPQLTTELVKEKKTA

SEQ ID NO: 381 - protein, 555 aa, synthetic construct
MKQELHCYLRVSTQQQVDEGHSIENQRFLGKRISRKLGMKYVEMNEGGLSSMSVRRPKFEELKTGMSIGRIKNIWYLTRSRWSRDTVEDLLMKQHYFKKYGVKVYEGEEGKERNFKDSKDELLDTILTSVQQFDRQQRREISVSGKKHLSLIEGQNSVFMGGTINFGFKNVDKKWTIDKEESKWVKKIFNLYLNDVPLVDIKSYLDTNNVKPRRSKTWSLGTLLTMLKNKVYTGEYVWVDKESQEEFTIIIPQLITHSIFNRVQKKLEKNTKNKGNNSRQYESLLSDLMTCYCGQNITGNVRQSVGKKVYVCNSKRNQWRGLHVEECENRRGMNMDRTDEFVGKEIKRIMTNSHLLKERFKEDILKNKGLKSQEIELEKNKLEKQIKPLNKQIDITVKSISTNEVNFMTQKTDKKIYQQIKRTLDTEFEELKKKKDVIIDQIDDLDNQKDWVDWLGEYGDDLKEKFKKLDTKLLEGLIKEIVVKPTFSKNRDGVVKQVGHRFNIKFKLPIINDQLNYLDPNKKSKGYTIENGKRSGDIGTLEVLKPGRKKKPKKK

SEQ ID NO: 382 - protein, 546 aa, synthetic construct
MSTESPKAYSYLRFSTPRQVKGDSFRRQVDLARNYAAKHGLILQDLSFHDLGVSAFRGTNREHGSLGKFIELVRSGVIDKGSYLLIESFDRLSRQDVELALPVFLEVINLGIVVVTLVDSNVFKAGEMDLAKLVTSIVYMSRANEESEIKSRRAKASWATSRIAAAEKGLRIKNSALPAWLDWNGDEIVPKEHESAVIAEMLSLSAQGWGYERIAAYFNAKKITTFRDGKPWRSAGIGAILLNPAIIGQYQPHEIVNGKRQPVGEPITDYYPAIVSKHLFMEVKQKISNRTIHSGSYRRGRYQNLFSGLLRCQCGEMLALRDKGKDGTSRLYLECPGKRTKNCSMRNIRYERFEPQVLVALSHMAPVMSARNQRTEHERAHLEAKADQELLIQRLNQNAERLTDIMLEVNNPERFRIRLLRIESEIASAKELLAKHNEALESLRVAASSVVLLTAASLDSPEERSAFNSQLHASLGPIQVLENGDSPIVRYQSKLGEWMFEQSFRDKLAGSTVLDMDGMTLCMTKSEAPFIDTAWHEDLMDESSIR

SEQ ID NO: 383 - protein, 528 aa, synthetic construct
MQTTGEFKITALYARLSSDDELQGESNSIIHQKQILEEYAATNNLNNYQFYVDDGFSGTNFERPGFQRMVSDIKNGVIGTVVVKDLSRFGRNYLQVGYYTEMMFPEYDIRFISVTDNVDSNFGYNEFVPLHNLINDWYAKDISRKQKAVIQSKGNSGKRLTTKAIFGYKKDDNGQWVIDSEAAEVVKKIFKLCLDGYGTQMIANYLFAEKIKNPSAYMGYVCRTKGDKNPYLWTAQTISSILSRQEYCGDTVNFKTQRKSCMSKQIIYNNPEDYKIFYNTHTAIISREDFKKVQEIRSKRKRISPIQKPVLFDEIYCADCGHRMYIMRLRDKSKPDAYSCSKYRKNSLVCSSHYIREGYLIEYILNELNVLLNSAQDEDFRKKIKDEFSKKNSITQVEIKKNLANAQKRIDEINVIIKELYEDKVNGNITLEIFQKLSSEFINEQKELSNAIIDYSKERADLDNSKDALKGFLDIVEKYRTQGSITQLTNEIVDDFIDKIEVFESKKVDGKRQQKVNIYFKGIGILSV

SEQ ID NO: 384 - protein, 589 aa, synthetic construct
MNNFYRYLLMPKAIPYIRFSAAHQGDGSTVARQQDRIADWLSKNDDYFLLKETFHDLAVSGFSGKHLEDNQGFGRILQAIESGDIGSGDCILVEAIDRIGRLEPMEMFTHINKIVSNGVDIITLEDNQTFSHKTLNSGHGQLFTLVGKIQQAHEYSSRLSNRIRSAYLKKVERARNGQTDNIRRHTPFWLTTSGKLIPENTEVLRECIALYIKGYGHRKIILTLVEKHPILSNTHPSTLKRWFKNRALIGEWETSDGEVIPNVCEKAVDLETFYELQRLAKARARRPSPSESYELSGLCYCSNCGAPYHFRRKRHLKEIIIYANCSQYLKRGAHYCDNKPSWPYEVLKFIHDNTYSLHLALAAMDLQQSKDAKRLQLLIDEKGAIDDRLKKLIGVLEVAPDQEVLIVRLKELDGQQKQLSKEINYLEKVLSGEELNALDLASEPDYRGKLLRDEGGFQVYENNDPYLNSVNSDIDAIESDPIHLRSSLKRRGYAIELNQKTASIRDAYPRGEFTLIKRSTRHNCYLVRWYTPPFEILSAEDEETKYPIEEDERFFAMRRNCGVIAAASSYEELLETLESITEASVISKG

SEQ ID NO: 385 - protein, 501 aa, synthetic construct
MNDTNPLAALAEGMTPKRAVIYLRVSTSEQATKGGQSEGFSIPAQREANKKKAQGLGAIVVKEFVERGVSGTSTNRPALKTMLRYLEEEDGAVDYVIVHKIDRLARNRADDVAINAKFDEYGVRLVSTSENIDQTPGGLLTHGIMSSIAEFYSKNLANEVVKGMSQKVRSGGTIGKAPIGYLNVREVVNGAESRTVAIDPERAPLVKWAFEEYAKGDISLGRLADELNARGLTTVPTRKYPAKPVTKRYVSQMLPRRYYLGFVQYRGVEFQGTHEPLITPELFAKVQQVLKARRQGELLRKHPHFLKSTIWCGDCGGRLIVQRPTNHQGRQYKYFICNGRASRRTNCTMPAIPEQWLLDQIEDLYRTIQVPEAIFPGLRQRLAQEIELSHAAVREERARLEKMRRDVQSKQAKLMEAFYNEALPVDMLAKERTGTRRRTRQRRASAEVLRRPGGRRAGAPGARPEPGEGLPPPLLHQRRPGEADAQPAVLRQDLRLYELPW

SEQ ID NO: 386 - protein, 487 aa, synthetic construct
MIALYARQSVDKPDSISISQQLELCRYEARGAPCRCFADRGYSGKNTERPAFGEMMAAVAAGQIRTVIVYKLDRISRSVLDFARMMQQFEQQGVQFISATEKFDTGSPMGRAMLNICIVFAQLERETIQKRVADAYAARSDRGLYMGGPVPFGFRRIPAVLGGVHTSVYVPEPEEAAQLSLIYRLYADPAVSLGEVAARLRAEGMQKRGRDWERARIREVLRNPVYVQADRQVYAFFAARGAQLVNPQSDYIGENGCYCYKSRDASGGEGCLQNRRIVLAPHRGLIPADLWLACQQKNTKAPTVRHGDGSWLSGLLYCGACGSGLTAKQGSRGRYLYCARRLHKGVCSGIGTLEAGALEQAVEQLVLDRLNGLGTLYGETLPDPALTGLEHALTETEQELTALLEKLPQADTALFSYINNRVTGLHLRRAQLEGQLAEQTAKASGQGILPDAALWHGMSPADRRRAAGVLIRRVEADPEQITIYWRL

SEQ ID NO: 387 - protein, 544 aa, synthetic construct
MDTEPRADRQTLEALGFSPEELQELGLWEPPTGAPNDLADVYLRRSKKSDTLSVLREQLRRMVRRVHDHNRQVRHVWFEQRSASKAYVKREEFDKANAAVLSDRASTALYVYKVSRLSRRGAGQVGLLLDSYDEAGAYIYVVSEGLDSRSSRMILTMLSEQAREQVRDLTDFVEIGIAAAKAEGRWTGGVTPYGLRCEPGSGKLSHDPAEYPTARRIAEYLVANRTPGWVKDKLNSEGLTSRSGKPWSTTGIIALAHSVSWAGLVPKRERALINGKYVGKYHRGGEPLIGPDGMPVRCGEGVITPAERQKILANLASRSRPGSPIGDRSRGKRETKALLLGWGTCGRCKGPYRNDGPHYRCRNRKELGATVCIGSSANRQAADDAMAVLWINHITALPPDSPVILAIAREWLSYQNPEASARRADVQAALESAVRRELTLGKERFVIGRMPEAVYETLYAELTAQIESLKRELAELDTEPDLTPLMDPLSVIDLWNDQDVAGKRALIGAALESVEFRPSKGRGYREPMLDRMTPRWKHQGGGAW

SEQ ID NO: 388 - protein, 485 aa, synthetic construct
MENGQVETLIVKDMSRLGREYLQVGQYTELIFPSYGVRFIAVNDGVDSLCESTNDFTPFRNLMNEFYAKDCSKKGRSVVRLKAETGARVSSRPRYGYMKDPADPKRHMVPDPETAPVVRYIFDLCVSGKGPAQIAKQLKKDKIPTPGYSYYQKHGVELTGVDITQPYNWSTNTVAGILEDETYLGHTINLKSTTLSFKNKKRIERPESEQLRFENTHEALISRQTWEIVQDIRKHKRRRANMAEQNIFSGLVYCLDCGGTMVLHRAHTMDAVKNNFMCSTYKKKGKDVCSGHYIREQELGAILLDDIRRVTHFARQNELRFAEHIRKKQGKEAQQEIAMLQKKIDTMQKRQAELTKLFKRLYEDSVLGRIPDEQYRILSQEYTTEQKEIQEQLPAMEVRLQELKDSSTNIARFIENAKRYKEIPKLTAEILRIFIKRVEVGERAEKYSRTAPQEVRIYYRDIGLVDELPQSMADSMAEEIPNEVA

SEQ ID NO: 389 - protein, 490 aa, synthetic construct
MTPKKPAPRAAIYARQSVAEPEGIKRQIAACRALAESREYDVVAEYVDDNVSGYKARGEGTGFARLLDDARAGRFDVLIVRKLDRLGRSLSALEALTAARVNTVTTDGALDLASPSGRLVANVLTSVSRAESEIKAERRVFANADRRLSGIPTSGRVPYGYRWVPTAERDGDGHAYVYDGGRAGDVLAIYDAFLAGVPLGSIARDLNAAGKRTIGTKRHPEGVPFTPTTLRRILMSPYYAGLLPLPSQDGEQRPYDQREISRETCVPGRWEPIVSVETWEEAKARLEHPERKTSPGPSRKWLLSGLAVCGTEGCGKPIRAGGGEAGIHSYRCASMAHFMRRGVPLDDFVERVVIARLSRPDAVDLLDDRERHDVDELRAERRRLETAVRQAGDDEMDGLIDRAERVRLTRRANARIAELDEKLRAGVDTTALAEVVTSDDVAAAWHGLTLGKRRAILEALATVVVFSVGQGNRRRMSDEALARTVRFDWH

SEQ ID NO: 390 - protein, 543 aa, synthetic construct
MESGPRGKLIIPSARSIVKTSELIPVIGYARVSTWREEMISIAIQKSVVEEAAIRRGRYIARWIEDPDATGRNFKRKIMQGIEAVEQGLFPEIWVWKFSRFGRNRYGVAINLARIEQAGGQLLSATEDIDASTAVGEFTRDMLFAVAAFESNRAGEQWKETHELRRSMGLPATGGKRFGYTWHPRRLPDGAGGWTLQDERYEVLDQQGDIVFDSFEEYRRGKTGFGKVAVWWNDLGFTNTRGDAWQDQTVKWFMDSGFAAGLLRVHKPDTRCPRPGRCQKEEHHYFRPAVHQSIVPGDDWEDYWDRRAIRKATPPRALEPVYPLAGLIKCGICQENKRTSAGQIHSCKGDPGYGYRCGARTRHHVQHEPVYIRRRIVEDAVLDWLVDKAAEIDAIAAGRVALPKPRKSPGAAQKRKRLEQEISKATKAIDRATEAYSLGHVPLDSYTRTRDKFTRQRDEAQAELDELPKLDAEPVSPVPHLETVRGLIKEWDTISVKSKRVTLAELVRRVEIFPDDRVEVVAVWDPPDPPREEKKSAARRAMA

SEQ ID NO: 391 - protein, 542 aa, synthetic construct
MIGCAPQLIGGKSMKAVRVWCYARISTLKQVDGFGIQRQINTINQFLQCVELDHRLPFTLDTQNVTQMVAEGKSAFREKNWNPKTKLGQYRKMVMDGVIGDSVLIVENIDRLTRLDPYKAIEIISGMINRGTTILEVETGMTYSRYIPESITVLVMQINRANSESKRKSIMMQKSHANRYGKVSKVRPRWFDVVEIDGIKQYRPNETAKAIQRMYNDYINGIGAAHIVRTYGNTDNGKAWTLVTVLRALSDKRVADDARYPPIIDKKLYDSVQALKAATNKKGNTHQKNMLNIFSGMSRCPVCNQSIIVKRNSHGNLFTVCLGKRTNKTCEARSIAYFALERPLLTAIRGLDFSEVYKHEDKNVLTLRDQWIQNERDIAAFRERLNKASRHEKFAILDELEIMNREQEELTIRLKSVDVPKDIQLTFDDDKLDLDTNYRIELNNRIKKLIQHINIVREDVSKSSYIIYCTIKYWTDVISHLVIIDVDIKRTGSGGTNTLTTTLKSVSSLNMDGTISGNPDSYAWEYWKSFLDSAIGLVDSND

SEQ ID NO: 392 - protein, 462 aa, synthetic construct
MRAILYTRVSSDPSGRGRSVHEQEVECRAVCEREGWDVAEVLTDNDIGASRWSGKKRPAYRELDRVLQSGDVLVTWEASRAQRDLKAYVELRDLCAARGVQWSYSGRTYDLTRGDDRFTTGLDALLSEKEAELTRERVLRGVRANATAGKPHGKLPFGYRIVRDPDTGESLGRIPDEATAPVVREIVRRLLEGEALYAICKDFDHRDIPGPRPRRDGQPVKWNPITMRKIAESPTYAALRVHKGVVTGPATWEPLISRADHDAILALLADPNRRMSPGPKPAWLLTGIGYCGACGAHIRRIKNRGHHSYTCNAQFCVSRKTNDVDRLVSEALIRRLEKPDLIDIINAATDDGSDALVEARALRARLDSFTDKAADGELSASALARVEAKLLPQIDAAERRARSLTMPPIVAAFAGPDAREKWNVADFEHKRALVRALVKVEIMPVGKGRRSFDPDAVRLTFI

SEQ ID NO: 393 - protein, 401 aa, synthetic construct
MLDPDLGKSAYHGYNFTKGALGELKRKVLSREIKEGALVIENVDRFSRLPEHEAIREFNDLILGGIDIHEVETGVVYSKKIPNTLSKLSHSIERAWGESERKSTIAKKVWKARRETVLATGKPLPARTPKWLKIVNSEYVIDKKYSDAVNAIFKLYTEGYGTAYIVKYLNNNDMKIDGLSWNTAVLTKMYSDERLIGWKSGMKIYPAIVGEDVFKKARVIKSSKVMLNKQKVNSSQKSIFNSVARCGKCGAAMCVSVNGHNKLYYWCWKKRGTKECDLSGFVYAYAELAILQHIKNIDWNKVYRDSDRSNERSEAINMELAELINYKLEIDEIINTTERLPTAVLRALITTEEKISKLEEEISSIKASEYPLDFDFNVDDITNQNSIELRQKCNIQIKKKH

SEQ ID NO: 394 - protein, 510 aa, synthetic construct
MSYFIYARKSRKDADLEALGIDVLERHITTLLELAKTLSLPIGAIYREVVSGDSIDSRPVMSQVMAEVESCMWDGCLVMDVDRLARGDTIDQGRVQRAFFYSNTKIVTPNKTYDPANEYDNEYFEFSLFMSRREYATIKRRMQRGRERSSSDGYYVGNIPPYGWRRVIAPDGKHFSLAPDPTESPVLDLMYDLCGNKQYGYQKACTHMAEMGILSRSGRPFTPSTLKGIISNPANIGKVRWGHRKTVRTVKDGKISRSRPHSSDYILADAVWPPRISADLFQRANHPKGSCSAPVRDDRPIQNIFAGLVRCSQCGRLMVRKKAHTKTPYDILICQYTECPTVGIRIDELELALLEWLRNYIDKYELTDALPEDVENVAAKEAIVKNFEKEHETLLKQRESLFDFLEQGIYTKEIFIERSNALERRVKECMEHIISAQNDLHATLALQANRKNFVPRCKNLLGEWGRLTIPEKNSALKVLIEKIMFTKTKRNKKGQDRSDFEIDVFPKVPK

SEQ ID NO: 395 - protein, 474 aa, synthetic construct
MKCIIYVRVSTDEQAKHGYSIASQIEKLEAYCISQGWGIIDILVDEGYSAKDLNRPKFTFMMDQIKKGGIDVLLVYRLDRLTRSVLDLYEILKILDENNCMFKSATEVYDTTNAMGRLFITLVAAIAQWERENLAERVRLGMEKKTKLGKWKGGITPYGYKVINKELVINKDEESIVKTIFELSKSSGFYTIAKTLSARGYGTRKGSDWHVDTVRDIANNPIYAGYLTFNENPKQYKKPPREQTLYEGVHERIIPRDDFWALQDALDKRRGSGGKRETSNYYFSSILKCGRCGHSMSGHKSPNGKTYRCSGKKAGKQCTSHIIKEDNLVKTVLNNLNGLFENIKGNINISNAPEAKIKQLEIELKNNQKLLKKQKAMFEADVIEIDELIQKTDSLREIEKRILAELKTIKKVGPSKVDEIKYISENIHTLWEYANDYERKQMMTTLFSQLIIDTKDEYKIGTGKAREIIIVSAK

SEQ ID NO: 396 - protein, 505 aa, synthetic construct
MTLAFSYVRFSTKHQASGTSLERQVNASKLFCSQNGLTLSNQSYHDLGISGFKNVRRPELEQMLEAIQTGDIPSGSYILIEAIDRLSRKGISHTQDILKKILQYDVKVAFVGEDAKTLQGHILNKDSLNDLSSVILVALAADLAHKESLRKSKLVKASKAIAREKAADGEILPGKSVFYLDYDKKNKKYVFNKRVDLARKIIQMRLEGKGPRKIARLLNEENIPGPTGKQWYQMSVKRLLKSPVLYGAYQTHQIIEEKYIPVSLIENYYPALIDYQTFSQIQFDDKRVSKGRPSRHKFSGVLYCECGAVLCRKVNTYETKQGPKEYQYFNCFGAFEGRCKNNKAIKDLHIPLEKAIDKLQIKTRSVKNIKNEQIIAKREKIDQLNKMLLELEMPPVSVLKTISTLEKELQELLEQPDVQPPKSADVKTLVAIKDAEQYNLYLKRLIKRITIFQLNGPKNIRIKIEKTDGHYQSFIVNNGKIMFNADTKALQEHLRKLKEGTSDED

SEQ ID NO: 397 - protein, 461 aa, synthetic construct
MRAGIYARISHDPYETTLGVQRQIEDCTREAKRRGWEVVDQFVDNDVSATRSKVRPEYERMMQAVKDRHIDALIVWDIDRLTRTPRELEDIIDLADTMNLSMANIGGEIDLSTPQGKMTARIKGSVARHESDQLSRRLKRAYQQRAIAGKPHSFPGFGFQRVERDGDVWDIPHPENAAIVNEAARRYVAGESLRSICQDFMSRGIHGPRTDNWTTTTLRQIMQRPANIGLRQHKGEIVGKANADPIMTEALYNQVMARLNDPERIKNSYGRTPNYLLTAIAVCGLCGGKMRMTRERVFNGKRYPDQYNCKVCFKVRRKREPVDELVTAVLVARLQDPKILAALAKDTTGELPRLRERVDELTARLDVAADNFADGLITGEQLRRINGKIMPELDDAKRRVGHLQGTNPVTQFIGANAAERWHKAPLEIQRQAIQELMTVTIMPAGSGGRFDPEQIKIEWKV

SEQ ID NO: 398 - protein, 520 aa, synthetic construct
MIVDIYLRKSRSDEELEKTLGNGETLARHRKALLRYAKENGLTILNIHEELVSGEELFFRPAMLATLKDVEAGACDGVLVMDIQRLGRGDMEEQGLILKAFKKSNTKIITPKKIYDLNDEFDEEYSEFEAFMSRKEYKMINRRMQRGRINSVEEGNYIATRPPYGYDVLRIDKNTRTLTPNSQQADVVKMIFNGYVNENMGCSKIANELNQLGIKSYTGAEWEKSTITNLIKNPIYIGKLVWKKKCIRKSKESGKKRDTYTRPADEWIVCNGKHKAIIEESIYLKAQEILAQKYHVPYQLKNRIANPLAGIVICGICGSKMIQRPVANKAPRIMCPKSCGQKSNKFITVENLLLERLESYYSNMLLSAKKTSQMREPTKSLLIKKNITSLENELKTLEQQKVKAFDLLEQGIYDIDTFTERTNYISGKITQIDNSMSESERQLHDIELKLTANQDYIIKLRSVLDAYIKMDSPSDKNLLIKSVLDKVVYSKEPDAGADDFKIALYPKIQCPPFHAMAQNI

SEQ ID NO: 399 - protein, 571 aa, synthetic construct
MAAYARVSVDKGRTMHSLSAQVSYYSKLIQKNPDWEYVGVYSDGGISGRTTESRNEFKRLIKDCKDGKVDIILTKSISRFARNTVDLLETVRDLRAINVEVRFEKENIHSLSGDGELMLSILASFAQEESRSISNNIKWSIQKRFKEGKHNGRFNIYGYRWVGQELIVEPSEAENIKLMYANYMNGLSAEFTAKQLTKMGVTAMKGGPFKATSVRQILKNITYTGNLLLQKEYTPDPITGKSRYNNGEMPQYFVENHHEAIIPMEEWQAVQDERLKRRKLGAHANKSINTTCFTSKIKCGNCGKNFRRSGKRQGKNKELYHIWTCRNKSEKGVKVCNARNIPEPALKKYATEVLGLEVFDEQIFIDSIEEIVASEGNMLQFKFYGGREVEVKWTSTARKDYWTPEVRRAWSERNKRKESRTWNGRTTEFTGFVVCGRCGANYRRQAVTSKTDGTVRRKWHCSNSAVACNEGKSRNCIYEEDLKVMVAEILGIPTFNEPTMDEKLSRISIIDTEVTFHFKDGHDEVRTFEIPKKKARTFSEEERARRRLVMKKRWEEKKRDEESNNDTSDNH

SEQ ID NO: 400 - protein, 601 aa, synthetic construct
MNEQLPVSRPKAYSYLRFSTLRQKDGDSTRRQLELAREYAYRHDLSLQDTTIEDLGVSAFRGRNNREGALGEFLEAVREGHIERDSWLLVESVDRLSRQAVEDAYQLISGILALGITVVTLQDEQVYKQGKLDLGKLMILLVKAQTAFEESEKKSIRTAAAWKAARDDLANGKKIKNARIPSWVLWNDDKTDFLINEPVAKTVRYIFELSINGFASGIIAKRLNAEGYSMLTGKLPKWSAANVLAVQQDRGYIGEFTPMKKNPETGKREPIADPAANYYPVLINPEHFYEVQRQLKGRQRSSGSYRKGKMTNLFTGLIKCGCCGSAMAVHQKNKKADVKKYGQYYYLSCSRKTEKSCTSKPLNYRRLERLLVSSFTFLPSILDGNQNNNTQLSDARLEVIRLEQSQKEVQNKSDRLMAVLMERDSNELLLKQLDKLTEEQRTIDNDLKQAIANVEQLTGTLAYTDSKYNDIFTELNSFEAIGYVDWRTRFNTQLRRILLKIVVTTNDSYCDDGVTITCFDNQHYPIASLYGRRSLKKLFGISNNYDIFFAASDNDTAPLDLIGTNARRDNFAIAKSEDEIDQELFDSILEFTKGTSGFDLP

SEQ ID NO: 401 - protein, 451 aa, synthetic construct
MLRVAIYIRVSTDKQVKDGDSMRDQLATGQKYIDSHENMILVDTYIDDGISGQKLKRDDFQRLIDDVRAGRIDLIIFTRLDRWFRNLRHYLNTQDILDKHGVSWTAIEQPYFDTSTPHGRAFVNNSMIWAELEAQNDSDRILGVFDDKVDNGEVLSGSTPLGYTIVNKHLVPDDDAPTAVAIFQYYRKTGNLSMTLRYMESEFGLVRSAASLKNMLTNTKYIGEFRDNKNYCPAIIDRDLFFDVQRLLKINIKSGKKHDYIFSGLVVCDDCDHIMSGCQQRARGRVRADGTRIIYKYSVYRCRQGVNLHRCPNRKLVFETTLEKILLERIRPELENYIAEYEVANLPALRTDAKRRSVEGKMQKLKDLYLNDLITMDEFKLDREKLLMQLEKINAEDSRPVKDLSYLKNFLKMDFESVYDSLSIPERRELWRSIVKEIRVDHDKNIHIIFL

SEQ ID NO: 402 - protein, 525 aa, synthetic construct
MAFPRSSGCWGVDTLDRVVLATRYSGEDEAGVIDRHRALLGAWLVEDEERVMAEGPDGGWVIDETVSGSINLDERKSLGQWLREPLLGNWDTLVVPEQDRVTRDDIHWWVFVGRLMEWGKRLVVLDDPGLDLSTPNGRMIAGIKATQAANYRKDVQKKLINAKAEYVKDGRYVGGHWPFGYRAVPREGQEGWERVIDPVSSKWVREAVDRILDEENPGSTQSVVKDWTKRGIPTAREWQAKNTPPKPGTKPKEPKGYKWQATSLQRVLLSPNLLGLGTWQGELVRKDGLPVQFAEAIISPAEALELRERILNNGKKRRGIRSNRSPLLGVVYCSCGSPMTYKHYKRPDKKYQYYRCCRVANEFTGCPKKARMWPLDVVYSYLEELFLSELGDEPYQKHKFVPGVNHYPEIQTLTEAIENLAENLGELPKGSRAARAAMEKMAEYEKKLDELEAQPVTPSRVVSTPTGKTFRDIWEGMETWDERGAFLARAHVMCVFAGTQTNPDVTLKWPDDLLGRVTRAVPMSV

SEQ ID NO: 403 - protein, 607 aa, synthetic construct
MKTLPFLHSHSYTGNVETPVAYSYIRWSSAVQGEGDSLRRQKHLAEQWCKENGVRLADDKIMVDAGVSAYRGKNLKEGAISAFVNAAKDGYIAKGSYLLVESLDRLSRMRTVEVLAVFLEILRAGIVLVTLGEESERLFRWEDINERDLEDAIDEMKSSHRFVQKLSRRVKDSWVGRTKDAREAGRHIPGNPPAWLYELNGELHMDEAKLAIVQRIFDMCISGLGITAIAQILNKEGVPLLAKHKRKTIKNRSDFWTVTSVAYVLRSKAVFGEYHPKDGDPWIAFPPIVAKEDYYRAEASRAMRHMVAKGRTGKHYTNLFKGIAKCHYCGEAMNIKDGRNQKQPNKALQFRCRGVGVKACSHKPWNYEVFESAFLSVVREIDTRAVIGDGSESKLAEITKQLQALQGERSNLMKVEETYLSAIEKTPDIEPIYQARVRSNRQKLDAINAQAKVLEVERNKVHAERSASNELLPVELPKDAKIRAKVAEHIRTIVECVTLKRDGTSKFGSSFTVHFAGGGIRTVHVDYTNPKKPYAVTRGFKGIDIIPDDLATATGLGDWILTETIREVDWMVENGGKAGLEGAKRVIGRMEEVQASIERQARELGFR

SEQ ID NO: 404 - protein, 618 aa, synthetic construct
MKRILKMSKLAIPYRRYSSDMQTGNSSLERQQQMINQWLVSEEGKEYTTSIAYTYLDEGVSGYSGSHIEKGDFGRFLEDMRSGVFKRYDSPTLLIENVDRFGRQKATKTVGLLDEIVNDYGINIRFLNSTKTITSPIGDTELLIFVVESMRSHGESLRKSEMVGKAWDLKRGRILSEGKTLTRNVPWWVNPADRYDVTSDEFKRRQDLIREIFNLKKKGTSCGKIATLLNERGEIIPTNRTQKPEKEYKRSRVRGKWDGALISQTLANRAVMGYLAPQAHTSSNSTVTRTTDPVTGKITKTFKLKEGKTLRPEIADYFPEIINHTLFSAVSLLKEDQAGRKRSSGLPNSVMLFKKLMYCSGCGLPLSVYGSRESYPGVYQCSGTRFKACDEISISRRDVDSALLNHLLPNLSKLNVNDSLAEQIAKLENHRDRLVSEAVNIYDIVKVAGMNPQTAQMIAENTKAQADANTQIDALTTKRNASEYESLSHLNLELYEDRVEAQIIIKRMIKKIIIDTDTRKMNITLVNGSEMHGFEVDSKINQRAGLNSALNPSEVDKEINETFGVHKVIHHVALRGASEEPEPHEPPEYDDKGNRLRDIQWRNEDNSEPECNPADEEE

SEQ ID NO: 405 - protein, 530 aa, synthetic construct
MNDRKSIRCAIYTRVSTDLGLDQNFNSLDAQYEGASSYIKSQAHAGWIQLRKRYDDGGFSGGSTDRPALQQLLTDIQEGRIDVIIVYKVDRLTRSLADFAKLVELFDKHGVSFVSVTQQFNTTTSMGRLTLNVLLSFAQFEREVTSERIRDKIAASKRKGLWVGGVVPLGYKAKDRKITIAESEAKTVRHIYHRYLELGSINALLEDLRKGKITTKRRSLSTGKVIGGIPFGRGPLSHLLRNRFYIGEVKYKNEILRGEQKPILDRKLFDAVQTKLDQQRQATATARSNSGAFLMGLIFDDGGNRMTPTSKIKKGVRYRYYISTALIQGESRKAGSAARVPAPLVEKLVIDAVQKRLKQNENDAALVVRDHIARVEVGLKTLKIHLATKASERKTTQKSQRSKPNILLVPWSKPSSKVAREIIPPARSSRRIDKRPIRSETRAKLVQAIAQGRCWVDELVSGSVTSTQQIASREQCSLRQVNLTISLAFLSPTLVKAAVDGHLPRGIGISNIRDLPYLWAAQHRSLGLQA

SEQ ID NO: 406 - protein, 490 aa, synthetic construct
MSPTSTFLPAHDADTAIYARLSRDRSGLSENVNIQIAEARDYADEQTWPVIGVFKDNDISASKYSTKPREDYNRLLGAIRRGQINIILITEMPRLYRRLEELLELIKLAETTKLRRIQTTDGISYDLSTAEGIHAAINAVNNAMLEAGRISKRVKRKQKARALAGKTHGGGRPYGYEKDGLTVRESEAAVIRECAERFIAGESIRDIVLDLNARGVRTATGCEWRIENLQRTIMKKRYIGVREYDGQEYPAVWPPILTREQWDRMEARRLSRKHRWPKGQTGVRKYLLTGFIYCGRCGGVMVGSGRTRQSGQPAQMRYRCRRTDNHGRVIGCGKSFRVAEPVELLVKEAVCHVFDDPKVAITLAPQVDEDKMRLLVMEYERRKAKLDQLVTDYATDVLSRDQFIQAKGIAEASVQEAREALAHYQDASAAARIPADQTIREAWDTSGLEWRRSVVQLVVEKVVVRPGHPGSKRWRGYRFNPEFIGIEWKR

SEQ ID NO: 407 - protein, 482 aa, synthetic construct
MERGWDIYHIYCDEDYSGADSLRPDFNRMIQAAHEKKFQILLCKSQSRFTRDMELVEKYINGLFPIWGIRFIAVADNADTEIKGNKKARQINGLINEWYLEDLSENIRMVFDMKRRQGQYIGGFPIYGYRKDPDNKGHLLVDPEAAEVVRQIFRWSLEGHGKQSIAHMLNDLGVVNPTRYKAERGWDSNHFCKQDFGLWNKNTVWRILRNEIYTGVMVQGRTKKASYKSKAIIVMPRDRWFRVEGTHEAIIDRETFETVQRNLDIRSREDGTGMVHPLAGLVKCMDCGSTMSKTSNGKKGKAQVYYLRCKLYADSGTKKLCTRHSIRLDRLIELVSQRIRDYIQAYYHLEELELPPPKDDHREAMLLEQRTLNAQLEKRSTALKNLYLDKVSGILSEGQFVELNQDFLAEKSRLERRLAQIDQELSGQEPPRNQEEVMAKARELLELKTLPRELAVMLIEKIEIGEQDQETGRQEVKIHWKF

SEQ ID NO: 408 - protein, 473 aa, synthetic construct
MRDLSRALGYCRVSTQRQHTEGHGLERYIDKLKQYGLTEEQIHWDIESGANEKRRGYNQVLELVRQGKVDKIIVPCFDRFTRSALGWEVAHRELQVFGVELVFLDGGSLDLETPEGLFTSRILAAMSAQVRDKNRYNATQGHRYFQEKKKIYQAIFGFIKYGDSVIPNNKLYRNTNNTHADIARECVEMFIESGELSKTIRVLTRKYGLERVGKYKFEDFPRDVSSFRRWLENPQLCGMICYYPYEPKKKIVLESQHQGIISLAQHQQIIQILATHPCGRRRYASNPLVGLCKCAKCGSTMEKQSTKINGKTYEYLKCPSAYPKPRQSKKCDVRTYFRLEEAINIVIQKLKQNSKDIAEHMPVENIEIIPFEIIELQQQIFKLKQLDDPDFDITISIKKQKLEALTKNLELHVATNSNRKEVLRSIAITEGFWDMITREELTAIFHELVEGVVCSVSETVIGQTQFFDVRLKI

SEQ ID NO: 409 - protein, 390 aa, synthetic construct
MGKPPYGYRCDPEDKDHWILDEEAAPVVKLIFDLCIDGKGPEQIARILEEKQIMTAKALYAKRKKKPMPERPYHWGNQSIAGILERQEYTGCTCNFKTYSKSYKLKKRIPNEPENMFYLPDTQEAIVSQAQFDRVQELRKNKRRPAKAERQGLFSGLLFCADCGGKLHFATSKSFEGKQDHYVCNNYKSNRGTCTAHYIREDVLREIVLERIRAVNEYIRSDVDGFQEEWLQCRRTDQERSIRDDKKKLEQAKKRLADLDVIIARLYEDYVLGNLNQDRYRKMSADYEAEQERLKLEIEVIEEWVEQREEMNDGLDAFIALTQKYVDVEELTQTIVNEYIKKIIVYAPDKSSGKRKQKVKIFFNFVDDVDIPVISEPIITQTTYEHRKTA

SEQ ID NO: 410 - protein, 508 aa, synthetic construct
MKRIAIYSRKSKETDKGESIMTQIKMCKDYFLRYDEESTFEVFEDEGFSGKNTDRPAFKRMMMLASHKKFDIVACYKVDRIARNIIDFMNTFDILRKNDVSLVSITEGFDPNTPVGMMMMTLIAGFAEMERMNIAQRIKDNMKSLAELGRWSGGTPPTGYKSIQLESGNKIITYLELLPEWKEKIKLSFETLANGHTIRQSANILNMPVKTVANIINNPTYCKSDELSANYLKTLGYEVYGELNGNGYIPYNRRPRTKNGKKEFNAKGMFVAVSKHEAIVDSDLWIAANEQIKQRGAEARPRISQNSFLAHLVKCSCGSGMYLEPGKTRKDGTRTYYFRCSRQRYDKTLCNTGWVNATYLEEDILESLNVWALDKSELESYVNKRPSGDITKNIKKIKKAIDKNNSDLHKLTEKLILLEGSAIDAVTNKMNEISRDNEKLNESLLLLERKNLTNDVDALNIEILQNKIKEIVSTWSELTIDDKQLLVKAVIKNIVWDGGKVFTIQPNL

SEQ ID NO: 411 - protein, 511 aa, synthetic construct
MNNTPSKIQKVAVYSRKSRPEETNEVLKRQLGILIDMCHAKGWEYDIFQEVGSSQDINTELNKMLEKVQALHYDAVLVTEQSRLGRNDLVIAQVKQILTNYGVFLLTPTNSIDLTTQEGVLLSDMQTLVDKQEYLNTRKRLIRGKRQSAKAGNWVGGRTPVGYKYDSVSKRLVPDEYAPLVERIFRLYLSGLSSTDIARQFELEGILTPSGSKWDKARIAVVLANPAYKGTVIYGKTKVSKVSRKPSGTPRQFKATKEEQIIIDDAHAPIVSPEDWERVRAIREQRNSKPPSARIGKVIFTGLIKCGICGRTHSFQRRKGKEIRITSCQTRHYQEDSSYTVCENKGMRLDKFEKLFYFQFEDFVKALEDYLDDIKNNIPIEAINAADEREIIEQAIKKHGQTIKKVQRGYENGGYTDEEFAERIKELRTQITQLEQELNKLDSKNQDEQIDELEASINKLRGILNGTTKMCTSDMNSLLSKYIDYIEYTRIGDHTAEPTLDIKYKGQEQTS

SEQ ID NO: 412 - protein, 472 aa, synthetic construct
MSARYAYGYVRVSTDKQEELSPDSQEKLLREYAVKNNIIILKVFFEIGISGRKADKRPEFQKMIGLAKSSDHPVDVILVWKFSRFARNQEESIVYKSLLRKQSNVDVVSVSEPLIDGPFGSLIERIIEWMDEYYSIRLSGEVLRGMKEKATKKGYQMSPPFGYRAVGNGDPYKIDPDEMKVVDFICDEFDYRNSDATKITRKLNDMGVRTRRGNPFESRSVERILKNPFYYGLVAWNGITFMGTHEVHYSKERFEARMKKIQTTYKPLKRRDVSSCKHWLSGILKCGYCGASLAYNGANRHSPGFQCYKYSKGIHTESCSISEKKVIAALEEYFEKLLSGMDFEYSYHSAETGAKISERESLLSELDKISNREKRIRLAYENEVDTLEEYKRNKERLQKDREDILVQLENLDKNNEDTKTKSDVLKNVQTVYDVIKNDAIDYDTKGIFMRSLVEDIVYDKKNGKLIFHLYIS

SEQ ID NO: 413 - protein, 557 aa, synthetic construct
MIKKSIAYCRVSSAKQSEQGYGMSRQQKLLLAYVENYQDPKKLGYELSTKNFQWMLQPGQSAFKGFNLEVGELHDFIKEAMTGKHQGVCLIIENIDRFSRATPSKSAFNFLALVNNGIHIHEVETGEIYTEDLNLDQLSSSVTRSNRESARKAFLSNANWNNRYEEALAGSSVLTKRVPKWMIVENDQYVLNTAASTIITYIFDQFIKGMGSTSIARELNKAERFIGGVLWYPQNLNKLLSDPRVCGWLTPKNNTTRCRSRLYPQIISDEQYQRVQNIKESKNQLVKHKPSEKMNNLFNGISTCKKCGSSMSVVKQSYKGELKYFRLFCAKRKELKTCDATSIRYDFIEVAIFEFIQNFDWNSVMDSQDTFKEDSLKQELITKNEYVTELRIIIDSSSAPDLSIIRTLDKANKELLNLQSKISSIIEKPINIDLSKFDINNTEDRTKYNLTLRKVVTKIEIQRYNSYVMIQFHYYSGIKKHTLLMESLTGKVRSNITKTESNNIHLYESNFTWVQHNTETDEVIISDDYFSEAMAFLILFMEQDNTSPRVIEKLRRL

SEQ ID NO: 414 - protein, 513 aa, synthetic construct
MVIGIYPRKSVYRDNSESIKVQIKLCKEYAKIMYKGEQLDFRVYGKDEGFSGKNTKRPSFQELMRDVKSNLLDVVMVYRLDRISRNVSEFSEMYDIMHAHNVTFLSVKESFDTSTPIGRTVMYILAAFSQFERESTSERVADNMHSLGASGKWTGGKLPAGMSSIRKTVDGKEHSFLVVEDERIGLVKMLYNMYLEGYTITALERYCRDHGLRTESGKFLSTSQIYCILSNPVYCSNSAAAYDYFKERGHTVPDKLFFDGTKGLVSYGKTKQSDKRVINDKYTISVGIHEPVIAAEDWIAVQNRFGVNKFYRSNKYEVGILKGVLKCSCGARMDIRTYVKNGNQFSYYYCARMAREGKNVCDTGYIRVDTIDDAFIKKLMQIKSNPDMIKVRTTELDFVDINKIEAELKSIEQAIENLTNTLSENSSSTAAAYIIKQIEKLDANKAKLESSLYSAMQNNKIVQSEKETKDIIYDYICCLLENFEFMSYQEKNELIKKAVKKCICSNDGIHIIF

SEQ ID NO: 415 - protein, 507 aa, synthetic construct
MKKDCFLYCRTSTTDQITSIKAQENFKSNEYSILEIFSDFGKSATKVKNRPQFIDMLNKCGVKIVSLENKIVFLPNGKKPKTNLIIVSHTSRFMRNAKYMEDVLDTLKEVGVEVRFLDMNKSSYDIDFKFTLSILFLLDEQESRNTSIKVKNGLKKAREQRQYLHYGFGNMLGLDYIKEENRLVKNKDSHIVENIFIDYGINKLSMRELANKYNKTADKIRRILMNEKYCGYNAYNKYNEDNRSTLKENYEIFESDRIEAIITKELFDKCRGIRLSRKNSDGGGKATDTYSLSSKIICSQCGKSYFHKAKNKKGDTWCCITKHNSKQCDNPNLNEDLIIKYINQNLDRYKEITQTLINLSKERLIKIDITNMQNELLKLQTSKDKLLDLYLTDESFDKETYLFKNAMIESNINSINSEIKKAQSIDESIEYLEKLQNSYNLQFNLFHDILNNNKYDIFNYISKIQVSKHFDVASNSIKPNIDYVIFKGFEKLHELEISIFPSATKFY

SEQ ID NO: 416 - protein, 485 aa, synthetic construct
MSSGNMNRPRAIIYTRVSYDKSGRSTSTQQQERACRSVCDVEGWPVADVIEDADLGASRRSTKARPGFQRLQQILGRGDVLVMWEGSRGTRRLGEYAEFRDLCAERGVMWHIGGRLYDLDDPGDRLTLGIGASVSEYEADQMHGRIMRGIQAHADAGKPWGSLPYGYRRVRDEDSGRTVNWRIESTEAALLREAVERVLHGESVYTVAREFNERGIAPPRGARTGWAGSPLREMLVRPVYAGIRRYGGVDIEGTWPALWDLETHDRLVGALATKDPIIRPGRVPASLLSAIAVCGVCGGPMEFRTGKPEIGRRARYECRRSCLGRRADKVDDMVREAVVMFFTSAPGEKLLARQHDTSGAHKALEEARQLQARLDEAQDAYADGDIELSALQRVTARLRPRIEEAKHRAEQASANPVLEHFRDADPREVWEQLTVLERRAVVADCLRVTILRMPFPSKKFEPDFVKITVRGEVPVDSLFFTDDRD

SEQ ID NO: 417 - protein, 401 aa, synthetic construct
MDVFYEVGCEGSSKEDRNQTDVLLRRQEAFSLLREPARSRIALQECISLIRLGVANHLHVPDESHLQDPVTRAVACAAVLAAGGEVTIGTKPVMMDDELLPPQELAFEAAREQYRLLPPTTESEGTHAYISRGWQSDEECARLAHKLVHEMRYSQAYTARIIEAVDGFDRPAMWTKQGLNRKIWQWEGKERIPRYNYHEVSGTEARRPGRLHLPAASFDAMAVLGDEQSLEEARNFDAALAKPHLGALPLFNPRHQERSVARLLRQIMESGFFRTLYVANPETVFSTEIQRRVVYDLALFRGVQVVEDGVQINAVDNNPRYNRLLRESTELFAALWIRDSATVLEESRSMAHAQQKAAELRSKGRSLRNIAAELQAEAIPTKSGKGSWSPSMVRELLDEKE

SEQ ID NO: 418 - protein, 611 aa, synthetic construct
MKKAAFLVRCSTNKQDYDRQVRDLQLVADRFRYSLYEIYGEHITGKDDTTKRDRLSIIRVRKDAELHKFDVLLVAEVSRMSRDSVSGRVYVRQFCNLGIPVYFRDKMKWTIDPQTMKEDESFVKELGLYFDGAAEYLKSMKTQIASGRRNSLMNNQLVVGHPPIGYKKRGGTDKYTKNELVIDEALAPMVKDVFAMYLEPEGTLKSVSLAISAKYSKELKGKRKTVSGVQQILCRKEYYTGEYTVYMSDPDNKDLEPEPFTITFEPLIDQETFDAATEKRDLKKSTDSPYPKQAIHPLSRLIKCPHCEHSFSPRVRSGDKPGEKHRIINGKKAYSWICMTRINNAGECNSHVNLNNEKTETIIWDLIKKELLTFADLNKDDRETRIYDLQQKIADAQNQIPVYEEEITRQDRKIKRAYNAYIDAPEIALEKAKEDYHKTLLDATKAKEDYAKEIKLLKKQIKGWEKSIDYYNNSNITTEYIDSIEDKEDEKRKIFLQLIQKIVPIGIRPGVVILQTHTINGIYWVLFDGNQVGQKRIAHYIHESFAVWHSTVKGEIQSSEAESYFSLKNTDVLVGTEDVDPAHVKFREMQMVCEANENVIPYNYIYERAHE

SEQ ID NO: 419 - protein, 545 aa, synthetic construct
MIIYIYSRKSKWTGRGESVENQIAMCREYMLYNIEGADKAEIVEYEDEGYSGKNTNRPQFQKMMSDIKKGQCDYLVCYKLDRLGRNIADLANLIETLNKLNVSFISIKERFDTSTPIGKAMIYFAGVLAQMEREQIAERVRDNMIMLARKGRWLGGNTPLGFRAEAEEKININGKNKKCFRLKEDAEDMKITKFIFQEFLEKQSLVGIVKYFLSHGMLTKRGKEYTTTTIKDILTNPVYCTADQDAYKYFWDLGCQVCMDEEEADGRYGLISYAKTSSSQYKNQDNPPEKWIIALGRHKGIISGKDFVKIQKILKQNSSKGDSWHKPQNPVALLSGLLYCSCGHAMRPKNYSTAQVTENGDRKFSYLCPYKDLTHGEKCSVPNVQGNTLDRLVCEEVLSYTDKNSNIGIMLERAKKRIMESKTDKVTEGEVLEQEIIKRKKEVKNLITAIAKSGNEEFIKQIEEEITRLNEECAAFEKERGNLGEEKCGMQGDQQQIEFVMEQLSSFKALFPALSVVEKREYLHMILERVVWDGEEAHIFIYGSH

SEQ ID NO: 420 - protein, 479 aa, synthetic construct
MGKQYKVIGYCRLSLEEKDQGSSLASQRSEIASHVERLGLKGDLEFLEDDGWSGASKRRPAFNRLKKMVDAGEVSALVVRGQDRLGRNLRDFLNFAEDARDQGVFVYSVFPQLESETAAGWQTMKMQGLISDAELSQISARQVFSQKERRKQGRSIGPPLYGFAVEHRSDGAFRVIKESEAKFVREAAQIVVDGGSILAAAKTINGKGSRTRRGGLWISSNLGDLLRNPGIAGMRHHRGELTTDSAGAPIIDKHLQILTVAQWRKVQAALEKRKAATTKVEGTVTEQLLLRGIAKCAGCGSNMNRDSYPNRFGTRVPIYRCPKGLEVGCPAPSGMAAHLLDDFVIAYFEPVFDQPVIARVEHDNAETVAERERLAMQIDTISEKLRTADRDQIVTLSEQLMKARDAADSLNVETVTEYVEMTGTNGEFIEEHPRQFLSTWVDQVLVTKGSRHEPMADRIEIILKPIEEHPWADVFRVKA

SEQ ID NO: 421 - protein, 581 aa, synthetic construct
MARLLGRVRLSRDTDESTSPERQIEHIENYAAMNDHEITGWAIDLDVSRSVNPFEAPELGPWLTDPLKIDSWDLVASWKLDRVAIGSVYLSKMIEFCNTYRKNLVSVTESFDLSTWIGRMIAQNIAAVAEGEWELIRDRNAGSAAKLRKDGRWRGGRANYWLKPKRRGKGYWLTLDPETSPVMREIIRQYLAHNPIDSIARSLSIDPDNPGGGYLTPAEYLRHRKCRSLDLEDMDYPESRRPITGAVWNPQSIRELLFSPALLGFQEHEGRMVRDENGNPIPVGEALITPSEFEQIMAERDRRAALRDNGVTEREANAGPLLRIAVCPECGTNLHYRTQRKVLADGSETEYLYYKFYCKHGPILRAEELEEEVHALFLMALGPLQQVERVFIPASDNTLEIENSRKALDELYTERAEVKSETAKEAIKAAIRFQDTRLAELEKTPKSEARYEYIPKGRSYFQAWNSMDESERRNLILESGITVAVHPKGSNRNWSFNLDLQVPHDMRERLGLPVNGPIENAFPMLNILKRMPGFHHEGSGPKPTPFTDAEQAVIKAMFSGTEDERAAVRDEFVKLTGWGLR

SEQ ID NO: 422 - protein, 512 aa, synthetic construct
MKAYLYIRFSSKQQEQGDSVRRQEEAARKWCKAHDVELSDMTFEDLGVSAFKEGGKRPALADLIEAIELGKIARDSYVLVENDDRLSRHGWYATQQMIRRMVLDLGVKLVVISSGTVYDSSNIEDIAQNILLMFNADRAHKESLRKSEMIRAARQTRRDDETLTGKLPFWLKRVDDKILLDQQKADIVRMIVELKKSGKSNQATARFLNDQKINSATGGKWNASAIRMVCSNHAIYGAKAYFITDGTRKMTLDKVVEDKLPAIVTKADFDAVQTTQKHRGRRSTKTPFSLLLKCGKCGGGMVQRTSMYKEKKMIYRRCIASLEGRCDQNKLIREPDVILSNALKHMQYIDSVEQYVSRVSSIQAQIDTLKQTQDRLIELGQVDALTNLYTRLAELEQKLVQARIEDEANEQKPIDFNYKNVFDLEDASEQNAMLKRVIDSIEIHYLGVVDKKTSSKWRIKVNQRNKHHQGFVINQYHGFGNWEIIHMTDTEKFKKELEALTDDIDDCIDFDE

SEQ ID NO: 423 - protein, 551 aa, synthetic construct
MKTPTCIATNGLSINLDNPSPKAYSYVRFSTKRQAKGDSLMRQLDKSREYAAEYGLDLQEKSFEDLGVSAFDRSNVTKGALAAFIRAVEASAIERGSFLLVENLDRLSRADVLDAMNLLSTLVKLGVRVVTLVDRRILDEESVKEPMNLMYAVLVFVRANEESATKADRVKKAHKRKRDNCSTFAFGQGPGWLQPNADRTGWEVIPERAESVRRVFEYTAKGYGATAIAKIANEERWPVPGRAADWHKTLPNKLIHNRRVLGEFEPQIKEGKQRRPTGELWQTYYPAIVSEELFNAANAAVERRRLLPKRRDNGYHNVFQGMLRCGHCGATLARKSKSGTRNSAGYGLYVCADRDRGLTNCPNWNARELEDALIPPLMTFVAADVLEGTVKQQARAALEIERTELAREGKAIKHLVGTIERIGTSDTISARILALEASIEARRRRVTQLAAQANDPVTSVWSEDVEVAIGEALRAVRDVTLEMAEEREALHQSLLRVVKQISVWPKTHAAVELHQGNGQVFLPLSEQAPIQDALKGLIAAPRLNNDTIATA

SEQ ID NO: 424 - protein, 499 aa, synthetic construct
MLQPRDLKGRNAISYARWSSGRQAKGDSLRRQTENAREFCATYGLSLDLALVDDGVSAFKGANLEASLGKFVIDVKSGKIAKDVVLIVENIDRITRVKPTQAIRYFLGLLDTGLTLVTLTDQRVHTAEGYDDNFANLMMSLMAMQAAYEYSAKISFRVGSSWVGRVKAAKEGGRVRVSKVPFWIDQKTQQFNDRVEDARLVFKLAKQGVGQTAITNRLNEQHIPSSRGGTWGKSMVQDVLKSPAAYGSLVLKGEEIRDYFPALISETEWLAIQHQHRSRHRNSQADSTRNLFPRLLRCGRCGSAMNMTSSRFSGKVFSYLVCSGKALRRTSCNQPNVKYDELEGVLVEQLGFLAVMERNEAKASTAGSPASEIEDAIKALEFKQRNVLDGIAEADTPEVRRVLLAQADAISKNIGLKKKELTSARETAARYASVADATPEELDAYAEEIQRLAKVDRKEARRLIGDVLERIDLDTDDEGTLHVSISFFNKHASVDVASE

SEQ ID NO: 425 - protein, 453 aa, synthetic construct
MKTASLRTALYLRVSLDRTGEQLAVERQRNDAERVVKQRGWNIVDTYTDNSVSAAGKKERPEFTRMLDAIKRGEIQAVVAWSLDRLARNARDRLALVEACRDHGVIIALVQGSDMDPTTASGRLVIGVLGEVAEMEIGLKSERQTAAAVQRSNLGRPPLGTRLTGYTPQGDTVAQEAELVRRIFKLFHAGESLRSITRLLTNEGVTTRKGRPWNPSSIRGILTNPRYAGRAIYQGETTGRQGNWEPFVSDDVFDLVQARLADPRRKTNRVGTDRKHLGSGLYLCAACDQPTSSWSQGRYRCKDKHVNRSQSQVDQYVLDVIAERLRQPDVADLLKPATEDLAPLLVEVERLRIRLVSVESDYDAGLIDGRRFASANESIRAELAAAQQKMATSNQGATLAELLGSEDPAAEFLTAGIMRQRVVVDSLATVRLHRGTRGSRVFDPQTVQIDWAG

SEQ ID NO: 426 - protein, 571 aa, synthetic construct
MKMKDKPQEKQYIIYSRKSKFTGKGESIENQIELCRQYIAVHFGEKAAKNALVYEDEGFSGGNLERPQFKKMMKDSQEIVFAAIVVYRLDRISRNIGDFAKLIEDLGDRHIDFISIREQFDTSSPMGRAMMYIASVFSQLERETIAERIRDNMHELSKTGRWLGGTTPTGYASESLSSVTVDGKVKKACKLGPIPEEIQLVKTIFSVFMETGSLSKTDQYLLEHRCVTKRGKQFTRFAIRGILTNPVYMIADDTAYQYLKENNVDLFAERSEFDGEHGVMAYNRTLQRPGKANQIRPMEEWIVAVGKHPGIIAGSDWVRVQAMLDVNKSKSYRRPRSNVALLSGLLRCGECGDYMRPKLTNRRTADGELIYTYMCSSKERSHGTVCSMKNCNGNTLDAKIIEEIRKLSADKETLTRLLAQTKKVISGSKEGYDAELALLREKHAETEERIKRLVESLSVASDTSAKYVMEQIDELHRESETQQARLSELEALTEQSRMLHQEFAFHQEMIESFASAVDSATLEEKRRLLRTIVKKVVWDGKNAYVYLFAVDGEADFPPVEQPMYPLGEDSE

SEQ ID NO: 427 - protein, 553 aa, synthetic construct
MTSTETREETAIRRAAVYCRISDDREGKGLGVERQREDCVKLCELRGWDVAAEYIDNDVSASSGKVRPQYRAMMASLERGELDAVVAYSATRLHRNVSEQEAFISAIRARGRDVVTVETVSGGPVNVHKAEGRMTARITGAVAVGESEQISERQQRKMVEVAQAGRPHGGLRAYGYRNVYAFDAAGNKSLQRVDLVEDEVRHIRTAVDMILSGASLYAAATRINADGARTTSKDGGTTWKETTLRRMLTNPRLVGKRSHAPEVSRYTRPDGKVVIVRGEPVEYAAIWPATVTPTEHAQLKARIGKRAAIAQSKRRDDGVNHSGENGAGNHVRHLLTGLLFCGKCGHILIHRPKTKSQRETYGCSAKLRGGCNGTSITADVVERYVIERVGRFIAAPVANPASMSDAVERMTAENAQDSAALVALQTAYREHRISIEDFAPTANGLRAQIATRTSELDATAVAVDTTARRVTLAERWDTLDADERREALRLALSSIVITPSRTRGRLSAEGLAAQMRDRVTITTVGDMLDVQREAEGLTEVGGRIGRVHRAETT

SEQ ID NO: 428 - protein, 452 aa, synthetic construct
MKRAIIYVRVSTTRQADEGISIDAQTDQCKKKAQELGASVLQIFRDEGITGTSAVKRQAFQRAIHYCAVNDVDYFIVWSTSRFARNKLDAARYKLLLRESGTRLVYASMNIDSDTDEGWFTDSIMEIMDEQVSRQISRDTRRAMLKNAEEGWFNGGRAPFGYQITSQGKRRKLVPNDAEKPLVQEAFRRFAAGEGAIAIVRSFTARGHTRRGAEWQAASLSHMLKNRVYIGQTVYNKRSGNKPNPPEEWVIRQTHEPLVSEKDFEAVQKRYRPDYKQTGSPSSRFLFTGLLRCGHCGKAMSIETATSKTKRRYNYYNCSGFKKGCNCISRRISAEKLDDYLLNIVVDKLLTQEVVSDFIGEAYRKYVEKRTNNAEQHKLLQQELTELRRRRNTLFELVESGLSGSDSRSLLERVAGVMMNGNKPCSSNSTSWRARPMSMQSRRLMSTAHYAR

SEQ ID NO: 429 - protein, 578 aa, synthetic construct
MGQIATIYARFSNAEQGRGSSLDRQFRICLEMAERHSWQTDPSRILSDEGRSAFSGANRQPGGTLYEFEQQVEQGFYLNGHVLIVEHLDRISRQGYDEVLPFLTKLTQSGVTIATVDGDRVYPAFERVPMGQVMEVILKAELARDESQKKAKRLAAAWHSKIEKAQTNNGDHVAITSTVPAWLDVAPDTKKMTLNEDRVRVLREIFQLTIDGYGTPAIAKRLNARGEPVWNYRGVRSNNGWTVGYLTKIVLNRAVLGEYRPMKRPRGNVRPESKGVVILDYYPQAIDPIMFAKAQAARKERANSSGSWQLSHGNILSGIAKCSECGGRMSQQVTVRKGQLRTDGKRKGRKYPANNDISYLYCANARHRVFDEEAGQLKCSQTSKIRYEPLERTIVDIIAGYAAQAQDNTDPARIRELEIQIAEARRQQEGKRQQAESAARSFVSNGSAIMEKVMLELEGEVSEIEKRITALEKQLDAERANIPTDDPRAPEQAWFKRVGEIKRQIYSDDEQQRKEARVKMKQIVGRFVSQLSCDRNKETHMILGGAVGMFIGADGTILATGVVQDEIVGPNGERNWIP

SEQ ID NO: 430 - protein, 484 aa, synthetic construct
MANTRILVAARLSRITDSGRTRIERDDEAAQRSAASREDATIVAVSEDAGVSGGTSPWKRPSLGKWLTDPNLIASYDEILASSIDRLGRSARDLHDLRAWAEDHGKTIRILSPALVWPPSPDDFSGPIVWDVLARVAEIERQMISKRYKDMRVDLRANEALVGRPPWGYIVVGEKGGKSLALDPDLVPYLQGMIDRARRGDSYLSICRWLDGEGLPPPHGIKWSPHSVVNALRNPALKGRRIELGKVVLRFESLLSSTEWQALQDLLDSRPTRRGPVSGTTALLTGVIECDRCGGPMYRFRSGRNRKDGTRRINWYYRCRGTDTDPSSCGNSVPLADIEEWVNLWFTTDVNGAFSNTEIIETTLVPGDDHAAEIAEIEAEMRELDPDADDWIEQAQALRSERARLKALPSEPSQVVERPTGITVGEVWAGLDEQARRSYLLASRIKIRVLSSAERRATPGAETRYIRGNPHKLIGSLQEISTAN

SEQ ID NO: 431 - protein, 559 aa, synthetic construct
MKSYLYSRISTLQQSEGFGIQRQINTVTDFLSFAEIDSRLGFSLDPSNYEILESDLGKSAFTGRNWKPSSSLGRFYESVMRREIIEGILIVENIDRLTRQSNYEAARKLINLITNGITIIEVESGMCFSTKIPESLSILNMSISRAHGESLRKSRMIKKSWDNKKAKLLEQGIAPSKKVPRWLKVIDGAYVVDEVLATLFREAFVLYDKGHGNAAIVARFNSEGRLNNGKQWTTITMHRVLRDKRLNGIMTFGKNTDRDNEELHVFPVVVENELFNRVQEKINGKTKYDRTTKSQKNLFKGMLKCSLCKQAILTTTDGSRNTHARCIGRRDHKNCTARGFIYIPFERGLLQYIRGINWSSIYNSGVDNSQAIENCNVKIATIDFEINELSEELKIADDDVVLALVRTINNKKKTRKSLSDELELLTRELPKVDFDNIKDNLHDPSNVKERQHVNIELQKVVKEIRVLRMSDYIFANISYYTCTVIHMIALDMKGNLITTSSIDENLRFHSDFIEWDLLNNKMEVINTSWTDVHQILWDLWSDIFDEAFEQAKGMFDGKH

SEQ ID NO: 432 - protein, 599 aa, synthetic construct
MKKKLYSYIRWSSAQQTSGTSLERQTAAAAEYAKTHDLEFVEILDAGVSAFRGKNATDGALAEFIAAVENGAIPSDSWLYVENLDRLSRATVRNALKLLLHITDLGVTVVTGMDGKIYSAETMDKDFTDLMISLLLFSRANEESKTKSDRVKEASMKALARVQAGLPATIKGGGADPFWIQRGGRETSPTQHPSHWLAIKKIVELSLQGIGCNRIRQVLNDDPTLYPPPRQKDTPRRRALLDAGLAPTGWNIHRIEDARRQPSLYGLKTITLSGHTYNLEGYYPAVCSEEEFHLIQNISASNRLKSGDIRNTITLLSGLNLCKCGSCGGWVTTFRKNGKLTYRCDAGHRKIHHCPTTWSLNALIIESATVRALIAGVAHNIIEDSQDLESVAGEIDNRRAEVVEIDRKRERLAVRIAEEDDDLLMQQLRQYNARKRDLLAEIGTLTQREALRSEEHNAAERLAEAQRLLTGEMVADIYTAERLAVRELIRKSVRQVSIWKRQDKSLKLECEFISGWRYSFEGVMDGSLKSFIEYQTSPDGINMLEIYGKLNAITAKVFSRVLGADDCVISPNLSHVQAYQDMAVRLGHSPLTGSQFFWK

SEQ ID NO: 433 - protein, 658 aa, synthetic construct
MAIQQPFLMVALPAFSDLRSSQQMDDTTPLPARKILYKYIRFSSIQQAKGSSFARQNARLEKYAEDNNFEIDDSLDLRDFAKSGFHGINKEIDQGLGRFIAAIEKGLIPTDGSAYLAVEQFDRISREDIDKAQDLFKSILRKNVNIITLMDGRIYTKKSLSNFMEVLYSLFLMEQAHQESLKKSDRIKGAYVNKLKKLKELAAEQKEILEEWEKNKSGKKPELEPLINQIQFSSQVPCWIDQKIEIIGGRKFRKFVVNEEKAKIVRYALSLLNDDNGYLNVSAQLNKENIPRLDFNTNRKRSTRKDIWTNRAVNEFVNSDSIFGELAVHNNFFVDKEFDYEGIKASKKVMTRTHLENIANYYPAIVDKKLIMGLRARANAKKKGRVAGRTTTNNLFQNMLFCGKCGDSMHLRQSKRETKKGTYQRFYVTCYAAAHKACDAKMFPYTQLEEQLVKYLINPVNTAELNEEGKVIEEKRKQKLLVLKGEIQDIQSRIDEFTQEITKNRNIKPAIALSIISEFENDKALKQSKISELEMQTEKLHDALQVGDISNFDLVGDDGRNGFKVAIKQRYAGFIIYTNEQILFAIEKTGATTIFKLQNKSRWGTVLKAEKGDIFEKQVQAIKFLRDRAADYKEGKLYELIQTFKATNIDIFEGQYIE

SEQ ID NO: 434 - protein, 563 aa, synthetic construct
MRAFLYCRVSSKHQTKQQGGTGITRQEATVIEYINDYQPDPKLGYQLSLDDHEMLDPDLGKSAYHGYNFTKGALGEFKRKVLSREIKEGALVIENVDRFSRLPEHEAIREFNDLILGGIDIHEVETGVVYSKKIPNTLSKLSHSIERAWGESERKSTIAKKVWKARRETVLATGKPLPARTPKWLKIVNSEYVIDKKYSDAVNTIFKLYTEGYGTAYIVKYLNNNDMKIDGLSWSTAALTKMYSDERLIGWKSGMKIYPAIVGEDVFKKAREIKNSKVMLNKQKVNSSQRSIFNSVARCGKCGAAMCVSVNGHNKLYYWCWKKRGTKECDLSGFVYAYAELAILQHIKNIDWNKVYRDSDRSNERSEDLNMELAELLNYKLEIDEIIKTTERPPTAVLRALITTEEKISKLEEEISSIKASEYPLDFDFNVDDITNQNNIELRQKCNIQIKKSIKSISFNKDDKVIIIDIKYFTDVLKHVLILDNKTGGVVSSISIIKEGDAINYSSGSFKIIEHEDGCTFDGIDDVSVTDYFMLANYIGSIREKQWIVDVMYLQHNMDAVLK

SEQ ID NO: 435 - protein, 403 aa, synthetic construct
MARKHLQVSEAPDNAARPRPRNVLIYIRVSTEKQSNNQLSLDSQEENLIARCKRDGDHIAGIFREEGETATNMKRPAFEQMIARATDGTRSVDAIMVYSFSRAFRNQVEQELTVQTLRKHKVELISHAEPLANDDTGDMFRKFIGIVNEYQSKETARSTMRTMKANAQLGYSNGGIIPFGYKSVDAEIIGNKQKKKLATEPVEAEVVIRAFDLAKNGDGNSGPLGTKKIAEWLNAHGYRSRNGSLFGTGTVHEMLTRRAYTGVRNFNEFDRKGDGERKAQSEIVEYEIPVIIDQATFEAVQALLVSRRPRSRGPRLASAPSLLGGLVRCDCAKSCALTTATGTSRTGVIYSYYKCIQSIKKGSISTTTAPPAAIARSPGLSSKSSWLRPCWTSSYSPNGSRPS

SEQ ID NO: 436 - protein, 514 aa, synthetic construct
MTPVNAFPVGLDHVAIYLRKSRADLEAEARGEGETLTKHRRALLELAKQYQYSIDHIYEEIVSGELIVDRPEVQRLLHAVREGKYSAVLVMDIDRLGRGNQIDQGIIQQAFKQSGTLIITPRKVYNLEDEIDEEFSEFEQFMARRELKIITRRMQRGRKLSAKEGKSITPYVPFGYKRDENLKLYPDPETAPIVRQIFEWSAEGLGIIKIAKKLNEMGVPAPRSSGWQRTTVQHILKNEVYLGRIVWDKKRDVKTPQGKYRSIKRPREEWIVHENAHEPIISQELWDRVVQVRKMNDHRTKDNYDLKNPFAGILKCKQCGRVMKRQPRPNRKGDTFQCYTVGCPTREVLISKLEDRVLKSIEEFVQSYAAQSSVKKRADNRQKRLETLQRHKRSIQSKISKLETQKNRLFDFLEQGVYDIQTFLERSKLVGEQLDQAREELRTCEQAIERETVQQQHEEELIPAISEAIEMYRSASNAEIKNMALKSVIKEIHYYRPRSWPRSKEFEIDIYFRI

SEQ ID NO: 437 - protein, 532 aa, synthetic construct
MIERNEAQVYLYIRFSRKTQEDGDSERRQLECAHRAAEKYNLTINEDFIMTDRGFSAFKAAHIRRGALGGFLEAVKSGDVAKGSILIVESLDRLSREAPFFAQMQFSSLISDGISIITANDGNIYNTREMNRRPEVFYGIYAVMQRAHEESKRKQALSAGSIKGKILKHERGEHTTNFTSVPSWITNKKDGYELNEKAKAVELIVNMYLNHEGLNTISRELAEREIKSPTGRKRWGITTIRKVLDNPALYGLNKFKLRYDSDGVTVEEKFEFENFYPALISKEEFLIIQERKKKKANSREAYGSVTYLLSSYGKDRCVCSKCGYTTGSQMQKQVNRKGEYTQSVMRLHCRKHKETLDCCSSFKCERLEHAFINAIHKELNPDFLKSHKTTKGNEESIRAQISDIDNEFKMLMKKQEKMKSMDLKLEIMKRIDELDSKRYELTEILNKKLTQVNGEADYEKLKSLANKCLNIKNSNERKLFKQILIQSVKQIVIDFKTESLACYFNNGNHLSLNYRTETDSYQTTIFYKRKPR

SEQ ID NO: 438 - protein, 577 aa, synthetic construct
MKKAAIYLRVSTTDQNYDRQEVELRTFAKMMDFEIIHVFEEKKSAVLKMDIREQLSEMRKLTKDDVDRIFIWDITRLSRRAIDFINLVNEFAEKGICLHFKERNIITLGDDGKLDALTGMYLYLLGVFAQMDAENRKAMMKSGKENALLKGHSYTNIAPFGYYLENKHLYIKEEEAKYVKQAFELYRDGKDTQYIADIFNANRVPLKSRRKDIVWVKGTISQLLKNTVYYGKGKLENIIKKKTEESPVEKKIRYFDAPAIIGKELYDECRNRAILNRSQQDKSKEIITLLRGLLVCGVCGKFYVIGNNNKQREYRDGDIRANVNNRVYCKNGSIKAEIADFIVWEAVKDVYTYNTFKEKCLEEKEKCKLELFQNETTILELQKDIANIIAQINRLGTAYLKELFSDEEFAEQKSSLISEKLRLEGIINEYKAKNLLLNDIIVADYDFSKYLIRDLSLGEKKEVCNQLIETILIYNYGTNRRLLHVKLKIGLRYNILVCTVSANKSYCIVDDATVTFNNPFKAPEIVRDLVNDFSVTSNNNNLFNEEIFGEYSYEDVWNIMDKYGYVKKLSSTKMVNN

SEQ ID NO: 439 - protein, 648 aa, synthetic construct
MVSPSVKKEGFVIPRFGEVETKFAVSYLRVSTAKQTKESKTGLNRQERSWNQWIEDHPDYEGWNFKFQDLGISGRGKHQTKGALANYLDQAERGVIPAGTVLVADSPSRLTREKPKDALKLLLRIFDLGHKISFCSGQWRGEIIESDTHGVWSRLVAAAEQSAELWEERSNNSNEYHREKIERLNNGDLSVHFHARKNKKSKVFYPHWLDFDDEAKLFSFNENAVWMRQVFEWATQAGCTEIAKRLKGMGIRQKKNRKKPISRDLVRSWLIHRGAIGEFQPQKDGGEKAGEPIAGIFPPLIEPELFNKVQSRMKKRNRNNSEPQLTDQFRNLFTKSIFCRECGHPARFHQNKKPMKYDLDNVYHSYSCSAGYVDADEICICKKRFTSKKRGVDFELDVLKRLQTFRWAEFFTNEKLEKKLDSAHGKKMRLLAKLQEEERVVKNLKKAFDQYLFDGEKVPERHAELTKQAQKNYEETYQNYWSSKIEEDRLRHERRGKDAEKDIQNLLRKFLETGRNNLRQRQEFSRWFFETGLVVDIDLYTGAFDVGIGRRENGVLVEVDYQLEHRAMFIRDGFTFEDNDGNPLDMNHFIKQKRIEDSKSKEQKIKESWEMINNPKNVLLQKAIMQHLDQLPKNSSEARNIRANLKVA

SEQ ID NO: 440 - protein, 492 aa, synthetic construct
MGASIVQSDNTIRVAAVYARISSDKTGAGLGVERQEADCRELAARLGLEVKHVLVDNDVSAYSGKKRPGYEKLLRLIETREIGYVVAWHTDRLHRRLRDLLDYCDAVEQAGTRTVTVKAGDIDLSTAMGIAHAQMGAVFAENYVRSAREKLVRKKLELAQDGRYMGGQRPFGFEPQRVALRNDEAEILRGMARRVIDGYSFRTVAVELNRRGITTQHGKEWNALKVRNVLTRPINAGIISHHGVEYDAQTPAILTGDEWMQLNVAIRDNRQRSNHPGTFRKHLLSGFVYCGRCGARMYNKSKQQRDGGMKPQVWCPGNNVNTGMPSGCGKVSRMMDPIVDLVTEAVMRRLDSPQLAEALERQKTTNNPTRELAKHLSVLEARMSELTNDYYVTKLLSRDEFETLRESTKSEITDTEKQIQEFTSTALLGGIDIGSDVRSKWDSESIEWRRDVLGHLIERIYVHPRGASTGYKVPTYKQWKFDISLIEVKWKV

SEQ ID NO: 441 - protein, 444 aa, synthetic construct
MTPKLENLQALIYARKSTKSDGKETGDQVRECRVWCDTNRIPIDRVIIDEGISASRYGRKTRDGWVQLKEIMRPGHIVVSWEASRATRDVAEWARVRDLCADRKVLFAYNGRVLDLTSGDDRFVGGLDILLAERESELLRERFMRGQRGAALKGTAPAALGWGYRPVPRKPGEEPKWELDPVEAPRIREAVQRIINGESLLAVGRWLEATGFAPANHTSLRRGLTRPTIAGKRVYRGEVIGDAVWPAIISEEDQAKVVEALKYDRTNPGPEPVHLCSGIAVCAACGGVMRHKHHKAQADVYRCTKGCGGRKADMLDAAVEKAVLRRLRNINPNDYASDNPEIAAAEKRIRELEADLAAWREKAINEEVSAEMFASIEKDRTRKIAELRPRTVAPQRQLLTASTWDQGTIREKRETVRALLVIRVLQVKHLGRRATEDDVDITLR

SEQ ID NO: 442 - protein, 425 aa, synthetic construct
MSTVEHQDRATSRNWQLDCATELVSGHGAIVTEYFDVGCSRRRSWRHRPQSAALLARLGDPLRGFDAIVVGEYERAFSGNQLLNLMPLLEQHNVQLWLPETDGPVDCRKPTHQALIMLLGVQSKREVQRSRHRVITAMRTQAREQGRYLGGRPPYGYQLVDAGPHPNAAHARWGRRLQRLEPDPATAAHVRRMFAQRLSGHSLASIARALNDDAVACPSTVDPGRNHHRTNDRWTLRTASAILANPRYTGRQVWNRQRTDIDTADGNRDAHGTVRWNNTKDWVISKQQAHTALVTEQEFIATQAIRSRRSAHDGTTRSYLLTGLLRCGSCGRRMDAHWVNQRPGYRCRHGHTSTQHPANQRRKILYLREDHVIARLAGHPSIARDTHSPHMLATFLREEKIHIVCDQTHCTPITARFVQVDPARS

SEQ ID NO: 443 - protein, 535 aa, synthetic construct
MNSYDISFRPEEVIQYLRKSRSDDPNMTIEEVLEKHEHMLRDFAVNHFGAPVPDCNVYREVASSETIDGRPEMLRLLRAIESPDIRAVLVVDVQRLSRGDLEDAGRLMKLLRYTNTQVITPMKTYDLRDEWDRDIFERELKRGNEYLEYFKKIQARGRLQSVQEGNYLGSKPPYGYDRAVIRIGKKNCPTLAVNKEQADVVRLIYELYVNKDWGAQRIANHLDSLGIHPLHNAHWNPAVIKDILRNYHYIGKVVWNRRKTITVVDNQEVYKTRPWNENMLIFDGRHEAIISEELFHAALARQGRSHRCRPDTRVSNVFASILHCSCGYSMSLRHDGRGSLRLSCDDQRHCKSGSIGYEELIDYICKVLTAYIDDFKIKVKHDNANEVDIHRALVTDLEARLTALEAKEVKQWEVYSMEGMPRAIFDKLNKHVKEDKAEVERALKQARKDSPDPVDYRERIAKFGDALNALQNPAASAEIKNQYLKAIINDMIYTRPGAVRLTADNCSDYGINYRDMAKRGGWYSPPFRLEIKFRF

SEQ ID NO: 444 - protein, 539 aa, synthetic construct
MGFFYGVFMSIAYSYRRFSSKGQEQGDSIRRQTELAEKYCIEHRLELSNQTYEDLGVSAWTGSNSHEDAGLGQFLKACELKKIPEDSVLLVESLDRLSREKIMKAMTQLMSITRHIDVVTLVDNRRYTSDMDFSDIIIAGATMVRANEESEIKSQRISAVWEAKRRDPKRSKKTRKCPFWLDVTDDSMDFVVNEKVEIVREAYRLSAEGLGNMKVAKYLNSKGFRTARDKDWSPANVSVLLKARTVLGEYQPCKVINRKAVSQGDPVVDYYPQVIDTELFNKVQICISDRARNIRMGSTSSHRNLIRSNGRCMCGGELFITSKRQGVAYFQCQNKTNSECSHSLFRYDVFLQFIREQVIRPMYFRAWAIDDSSNEHESKRDALVVQRNIEQSKLDALLELDLSNPSITLKIGVLANQVEKFDSEILEVEQQIAKSKLGNFKFESLDTMLKLTDVAGEGDSTEKQISARVQLNRMLSNFKIELGSNERKSLVYIEYFDQHKQEYSKQLFQTKTTAPSRAIKKKKMIWELIDLTLNKQTFD

SEQ ID NO: 445 - protein, 515 aa, synthetic construct
MKAYSYKRFSSKQQRKGDSLRRQNKLINDYCHQHNLTLSEHNFEDLGVSAFRSTNSNEDSGLGQFLLALQENKISTPCYLLVESLDRLSRDNVKTAMRQLWSITDYNVTVVTLSDSKQYTRDMDFTDFLMAGLIMQRANEESQTKSCRLLATWENRRTNPNAPKTKNCPFWLTLAVDKQGYSVNDSVQLLHRVYDLALNGLGSPTIAKTLNREGIPSPTGKTWTDATITKTLNSRSVLGEYQPHQRIYQDGKRKDVPIGEPLKGFYPTIFSEAYFNQVQAAIKSRAKSKNRGATKSHLNVVKGIATCSLCGGNIRLKKQSELYYLQCAEREKGLCKSKPINLRFLSDWLSEVWTRADYAPISASETPESEKLKQLESKLSNVENVISGLLRLLDGTNDYQILSSLESRMVEKRELMESIEKLEAELAPYNLNTKAMRKRYTLVKLAFMQSSEQDIIIARNQLALLLNQLKGFKIGMVEGTAYFDVVTPSGELKRYQSVNRPYYKGRMPQKIWTSI

SEQ ID NO: 446 - protein, 577 aa, synthetic construct
MSKYFLYHRVSKKIQSTDGQGMERQTEATEKWIEIHNESRISEGLKPYIYGRRYEDKGRSGYTEENIKKGQLGKLFCDIENGRIEPGDIIVFELIDRFSRAEPGIVREHLEKIMKAGVKVAITKWNIVFSSEMQGPLGLSARIMLEIGLYLANEESRIKSERIQATIRQLERQGIKSVAKTPIWLHRTKDRRDYRLIDENVKVIQKIFELRKLGLGAKRIINEIGPVELPRYRYDENGDLITTTSNKPLCESAVNRYLRDEAVLGYRDGKKIYDAIVDEKTFNSCQQKISKTKGGKVTVVKNVLSGIVYCDHCNKKMAFGGEQVSKFGKVRSYIKCNGKTKANGCNAKDIKYAPLESSVYNLLKHIEDKQETTVDINALESEMHAASLKAKRAMTFMLDYDYDSQWKDVYEEQHKIINELKSKLSQAKAERAGKLTELDLDLSQHKEKAKFNQILKDYDVKAYLGHDPVTKAPYVRLIIGAWNDFEARTTIGKDVNAKRVKAGMRLGAKGINFDIRERGHIEFHEPEVIADEDLAMQLRIERGANLMLKVLTDEQKKDLVNRVKSQSKDADIKSESD

SEQ ID NO: 447 - protein, 486 aa, synthetic construct; identical to SEQ ID NO: 43

SEQ ID NO: 448 - protein, 523 aa, synthetic construct
MDSNIKNLQDTTEPNQPTLAAQYVRMSTDHQQYSTINQSDKIQEFASKNNIKIIKTYADDGKSGLSLNGRSGLQQLIQDVESGHTEFKIILVYDVSRWGRFQDADESAYYEYICKRAGINIIYCAEQFANDGTNFSNVMKSFKRTMAGEYSRELSNKVFIGQCRLIELGYRQGGTAGYGLRRALIDQHGNFKTLLKMGEHKSFQMDRVILVAGPDEEIKVIHQIYEWFIQDNLSESQIAEKLNSKSIMTDFNRAWTRNTVHEVLTNEKYIGNNVFNKTSFKLKRAHVTNPKEQWIRKDQAFEAIVPLDMFYTARGIIHERSRKYSDEELLNLLKELYQKHGFLSGFIINESDNTPKTVVYTNRFGSLLRAYELVGFKPERDYHYIEVNKFLRKLHPEITEHVINEMSKLNGSNIHKDPVNDLIFISDEVSISLVITRCHRLSSGNYRWKVRFDTILNPDISVVVRLDSTNTTIKDFYLLPRLDFMSDKISIGEFNPVELESFRFENLNYLIGMAERVKWKHIA

SEQ ID NO: 449 - protein, 553 aa, synthetic construct
MWQYDTINGKFIPGTLPAEGNITACYDRLSQEDELEGDSGSVVNQRDFLRKYCEEHHFQNVRHFSDDGYTGTNFDRPGFQEMMDLVERGRVTAIIVKDHSRLGRNRLLVGALMERFTEDYGVRYIAVTDNIDSAKGLDDMTAVRELFNEFYPRDTSKKIRAVFTSKGNSGQRLCTQVPYGYKGNKYGWEIDEEAAQVVREIFSLCMAGLGPMQISKRLKAAGVLTPTAYKLEKGLSVTHKPTADPCGWDHRAVVKILERMEYLGCTVNFKTRKKSYKSKKMLYLPPEEWKVFPDTHPAIIDRETWERVQELRKHKRRPTKAGKRGLFSGLAYCADCMSKLYFATHKGSTEDQDHYVCSNYKSNTGSCTIHYIREKVLTALVLAHLQATIAYVQADENGFIRLVMDKDAQEQRRELARKKAELTKAEKRVTELDSLFQRVYEDHATGKLTEERYNRLSGSYEAEQRELEARVAELRRELAKGQEEAVNVSHFVELVRKYTEVRELTPTIVNEFIKMVIVHAPSKVNGKRFQPVQIVYNLVGEITIPGTMDSKTA

SEQ ID NO: 450 - protein, 490 aa, synthetic construct
MLQAVHGWSSTYERLVKSQKFFSSYLTQEDMSRFGRDYLKVGFYTEVMFKEKGVRFIAINNGIDSANQQDSDFTPFLNIMNEWYARDASRKIQAVFKSRMQDGKRVSPSVPYGYLRSPEDKQKLIIDEEPAAVVRRIYQMVIEGKGITAIADILTAEKVLIPSAYAKIHCPENDHSRGFTNPYLWSATAVSYILEKQEYMGHTVLGKTISVSYKTKKRRKAEPDELMIFKNTHPAIVDEETWHLAQKLRKTVRKPSYNRPPHPLTGLVYCADCGSKMTHRQPSPTKKKKYDADDAYICGSYRQRTKDCTMHFIKTSVLWELILTAIREVSDYVRQDEQAFIDKVQQTSTVQMAETQREQKRRLAEATERNEELNTLIKKLYEGNATGKIPDKHFERLLADYDREQTALETEIEDLQEQIDSFDEDNTKADKFIAVVRRYTDFTELTTPMLNEFIEKVVVHEATGGRTDRKQKIDVYFNFVGQVELPPDRA

SEQ ID NO: 451 - protein, 564 aa, synthetic construct
MKIDFSAKPKVYSYIRFSRPEQARGDSLRRQLEKARLFADKHGLELDESLRDEGVSAFRGRNVDDRAALGSFLKAVETGDVPRGSYLLVESLDRLSREHVLDALPRFLDLLNAGIRIVTLLDSQEYSRESVEANNYQLMISLGIMARAHEESATKGHRVLEAWEKKRQLAASSGKAMTKICPAWMKKDGDEYRLIPEHAAVVRRIFESSISGIGTRSIAKQLNADGVKPFGGGRIWYDSYIKKILDNPATYGEFTPRGKLAGGSDATASATLKDYYPSVIDERTFHKAQVMMKARAASSVRRSAGVHRNVLSGLLRCQVCGGGMHYIDKGKRGGKPYLQCSSSLLHAGCDHNKKHAYETLEAKVVMNCSPTVNEAENEKVVEVQACESALMDIQARLERMADAVERNGLSETLQQRLASLEKDKSKAETALAKAKNAANRDTVARNFGVTMKEAAVLATRLREEPGNVELRTYVSNMLRSVIEKITVGPTRFHTRSALGFEAEENLPDEGAVMAYVNRWLHGAGRSDGSSTYTMTPLPPLISDREIQDAENELKGLYPSGSAVG

SEQ ID NO: 452 - protein, 628 aa, synthetic construct
MKAAFLIRCSTKNQDLNRQTRDLTRLAKSMGYEYDLENLVYGEKITGKDDVTKKNRDSIDRLLRAAKEQRFNVVLVSEVSRMSRDPASGRIYVRLLINMNIPVYFKDIDLWTINPETGKKVRDAELVIGAAFDAAWKYLKSMKTQIASARRNELDNNRISIGQPYFGYKRYEGTDKSKKNQIVVNEEEAEVVQAVYNEYLKEGATLKSTALAITNMYGEKLNRKFSLGTIEHILTYESYATGIKKVNLKDPDTDEVEVFDVSTPIIIDKELYEAATNKRKKNRVKDEPYPNQQVYLLSKLIKCPDCGYTLTPRRKAGEFGQTYRLVNGKPAVSWFCMSGINNITNCTNRTSIANEKLEPIIWELVKKELIGYANMNDEKREEQIRECEEKIEYQNYSIQNFTKEIDKLKKRLSTAYQFSINAAEMAGDDEDMRTMAMEEFNRTAKGVRQEMKNFEKSIEQAKGELEKLRDLKTFYSQPTLPKDYLEQIEGNFTEKRNLVKQLITKIVPYRITTFKKKERESGVKTCNKMITVKNGAVLLEVYTIGGVYNVFYNANSKFQVKTAYYVHGEYATFQNGIRKYPAYNEGEYFVISNANMVMETDDIDEVVTVNEFVDIAIANNWVIEYQYI

SEQ ID NO: 453 - protein, 530 aa, synthetic construct
MSFGYWREQHARTGPLLLCKHEECTVRIIGYVRLSRASREESTSIVRQRELIAQTCTLRDDFELIDLVEDVDVSATRSRLDRPGLNKVREMVRRGDADAVMVWRLDRLVRSVVDVGVLLDEGLQIISATENLDTTSAMGRAMIEILQVFASMEAKTIGVRVAASQERLRNNGRWPGGVVPYGYRSVPHPTGAGRALEPEPFEARIVRRMADEVLAGSPVFAVTARLNADGVPTRRPIKNDDGTESRRDWSPTSVQRILRSDAVLGRVRLGGIHKRSGRKTTTTKKAEPLRDELGIPVSVWPPLLSVEEVERLRELTDWKPIPGRSEATRQGRRQRRTRLLSGLLSCPTCGHELVAKSRRSTTGEDIYTCNAKSRGLVCECGVAVECYRIEAEVERQFLGAYGRLRLVEPSTIIREVAGLAAVQEAIRDTTDRLRDPDADVPTLVDRLTDLRRERERLEAVPERPVVVMVDAGMTVEEAWADRDVTLRREIIEASGVSITLAHAAQRGRWDPARVSVEFPIGYLTERDFAS

SEQ ID NO: 454 - protein, 557 aa, synthetic construct
MAVKLPVFCYARVSSFTQTTEQGGYGLSRQHTTFDSFLQYCNEVIPQDLPRLDLERVTYLNDSGLSAYHALNWNKGQLGQLYQQIENGIISNAYLIVENIDRLSRRNPFDAIQKISFMIQHGLYIFEIETNQIFSHNRPESLLALQMSLNRSYSESKRKSVITIKNFKNRIDRYLQDGELFTKSSKSIPRWFDIDVKNKKLIQNDIATTIQKIFEMYADGFGNGTICKRLNDDGLLDVKRHWNTITLSRVLRDRRLIGEKRYGRICRAKEDEELIENFWPPVISRKLFDRVQAIIGNHKVSHIDKTTKKQKNLFHGLTRCGICGSNASITSNNRSMDYICCLSRRHHISDVCTTAQYMRWSPIERALVAFLDGIDWRQIYQPESNSKSVLDGLCAELRAVDQKISELKAELNKSDDDVVLALSRSIRKNQELQTELQRKIAAIEDKSGTKSVSFNFDEKLFDQNEVELRQNANVEYRKVIKEISITKLDDTYVFCTIKYFAEILHFVVIDLNTAKVESFATFDNGKAVMQFTDTEGGDMLRDITKFAINEYIKNNSK

SEQ ID NO: 455 - protein, 561 aa, synthetic construct
MVKAYIYTRVSSLQQSDGFGIERQVHTLMDFLEDAELPKELGYQLDPHDYEVLEQDAGLSGFKGHNFTKGSIGKFKNRVASGEITSGCLLIESVDRFSRKQGYDAIDEFTFLIKRNIDIIEVETGQIFSYKLDHKLTQLSTSIERAYQESKRKSRMAVKSWANIKRKAVEEGIAISRNVPYWLEVKNNEYLTRTEHVNKIKRVFDMYINGVGVTSIVRELNKEGGKHDGGVYSTNFINMMLRDRRLLGWQRGKKKANETQEEREKRAIKIYPVIIGTDIFDLVQRKIDANKVTKSVRTSSKQKSLFNGLVRCEICGEALVGHFSERGNYLRCIGKRSKVGSCDSRLIKYSTFEESMLVNLKGIDFKEIYTNKNVSDDHVNNLRNELAVVNAEYDEIEGLLNTSGSTIEIVALSKALREKNKDKDKLQSELTTLTNNNVIEDVEIDVSKLTNQNNVELREKYNIYLKKVIKEIRVKRVDDILYVMVQYFTDVISHLFIIDGKDGTLLSRSHISNDLVFESDMMTIDMLKGEWELKKNNMSQWDELALDIWQSVVESAVKSIK

SEQ ID NO: 456 - protein, 519 aa, synthetic construct
MTATAKAIKHVAMYLRISREKKGKNVDTLENHRVKLLEKIKEEGLTHEEFGEVVSGGSSELEKRPKLQELLERIEEFDAILCFEISRLSRNGLISQTVKQYCIDYDKPIITNEDIYDLANSSDDRLWFDVESMFSSQEHSKIGKRSKMNKIQMAKAGLDIAGGVPFGYKRNKETKKLEIYEPEAEIVRYIFKLHGQGLGSFKIRDILNEKGIKPARGNHWNLPAIKRIIRNEKYKGWNFFNDRKRIKRNGKFTYEIVDTIIVKDAHPPIIPPEEWDNANIERERRAKVASRIKHKKTVSMVSDLLYCGICGRKLSIRSDRKTKKVHVKTCDYLMHENGSKCRNNGVLLEKVEEEVLKTIKKYKKDLQEVIDQLLEADISNVEQEIKSEITSLQRQQRELHSQKKNLIKAVASGVLTGEDIRSEKEKIEAKQNAVNSKLEELESQLQTLDVDTIIEVNKRAIEALKDFERHSPENQNNTLKRVISRILYTRDMPDEIKALTTRNPLRREYPFTLEIEYLT

SEQ ID NO: 457 - protein, 503 aa, synthetic construct
MVGRTLSKYEKHDIRHVAIYLRKSRGDEDKDLDKHRDELVELCLRNDWQYIEYAEIGTGDSILARPKMQQLLVDVEAQSFDAVVVIHYDRLGRGDKVDQSRIEKTFAMSDTLIITPQKVFNLNDESDMMLADFQGMIARQEYKATSRRMRGGKRRGALAGNWSNGTPPFPYIYNRLTKKAEPSEINLPVYRNMIESVLNGYTTTDIAWDLNKKGIPSPRNQLWTPEVVRRIVCDEVHLGKVIVGKKTKHPTMGTIMLKPKEEWVVVNNAHKAVKTQREHDKIMFIISRERETPNAGKAGKHAFSGIIRCAICGNTLAIQKRSNRPHDLLKSCKHYDHWGNRCINMGSSMEIIEENVLQAILLKELELEEAIKKGVTLDDIRNLLAMSEKKLEEIKEQEKAIDRIYNAYEKGVYSDEVFAERKDKAEAVLYKLTQEYEFIQKESDNTQNARNEDMLVTIREVRDIITESKDPKTCNRAYKSIIHSIMWSRESIECKPTVKVNFL

SEQ ID NO: 458 - protein, 532 aa, synthetic construct
MSVEHVCTICGKSEPNAVDLYTRKSKRLREDDHRREQSTDAQCEQGHRWAHRNGYAVRKVWRDIQSAFKDVKRSDFDRALRALANGEVPALWAYAIDRFSRKGADDLLKVIGKARVIFDMDGLDSNETRDRRWIINRAEEARESSENLSKRVRDTKEAQRDAGLWVAGRAPFGYVVSRDRVLTPDEEPYICHVATRTEWTRAALLREMFRRIAEDGDSTREVCRWLDGMGVPSPGGSSWGYAYVHRMTRNPAFSGWQVIQIRPGHPEAYRNSKGQKVRLKGKALVTSEMQRKAQETLTGGNLIPLAHRARDTRRKHLLTDLMRCEGCGRSMSMGGASYKCQAATGGTGCKAIASVKVEAIENFVFNAWLARLTNAAEDDPIVIAVSERWTARVRPEETAEEQTARAALRTAEAGLKRLLDDRQAGVYDGAAARYFGPLLRDANKAVEAAREEVNHYSHGGTVTLPFESVEHETLTATWDAADLPKKRDLLRLAIERITVRKAPRQGARFNGHERLVIEWAQPAQQEDFAEAA

SEQ ID NO: 459 - protein, 528 aa, synthetic construct
MFTCLLYNIIERKQRRLFVLQYENNAILDVQSVAVYLRKSRNEEGETDVLQKHRNQLLDFVQSYGWKFDLFQEIGSSDDLEFRTEFKRLLERVQAGIYDAVVVVEFDRLTRGDSYDYGYIKRIFAESRTKILTPYGEIIDLSDEFNVMNDMKATMGRYEYLQTKKRLNEGKLRSARLGNWVNGTPPLGYDYDHKTKKLVINEDEAKAVRMIFYLYHEKGNSMDNTSFEMNRLGFKTKRNDYFTVTKIGRILQNQTYVGRIVYGKSEGSGHKHKKSKTLRYKPENEWLVVVDDAHPALISKDVYEQIQIQMTKKRRIPPKARYSGYALTGLMRCNRCNSIMNFTKKQLVKAGWKCYVRTCVTPDPFGNRCNCRGCDASIVLDYVRRNIEEYIPRLMEQRDMGENDSVERLNRKISGLHTEIDKLKEGIGRIKSLFIDGMIDKEEMNGKHEEQTSKIEEKQRELREAEKELAYASSESVDDKIERLEIAKREYDLTDPFSSETNEYLKEIIDCIYYDRVDDEISLKIEFM

SEQ ID NO: 460 - protein, 478 aa, synthetic construct
MESTLKMIRAAGYGRVSTEEQANEGHSLDAQREFNLKYIENEKWILSGYFEDPGYSGKNLNRPDVKRLIQEIKSKNLDALVVHKLDRLTRDIKDLYEMLQMFDEYNIKFVSISEKIDTDTAMGRMFVFMLGIFAQWYRENLSEEVTKGMRARAKKGLPNVFVNMFGYTRTPEGELIINEEEAKWVRWIFEQYLNGKGTPTIAKELNNLNIRRARGGRWSQTKVMDVLENQHYVGNITWKSKKDDEEDRIIRKGSHIGIIDQETFDRVQRWIQRRRDGFRSRNSYNYAFGGVLRCGKCGGRYKGKYSVSGGTITYNYVCSNKERYHTCDQSSISEVKLVKMLFKSLDMDNENLFWKDDVKESNNSEEEQIRRAIKASEERRERWQMAYGDGFMPYQDFSNRMKEEMQRVVELEEKLSGLPGAVVSTLDPAEVINVMKDIKDNWWYMERSTQKQLIQELFQEITILKDGKEWGIKGIAFA

SEQ ID NO: 461 - protein, 554 aa, synthetic construct
MARKSKYEERSTRPRARLWKPALYVRLSREDGDREESDSIVSQRELLTEFAAAREDMVDPRLYTDDGCTGTDFDRPAFQRMLEELRAGKIDCVIVKDLSRFGRNYVGVGEYLERVFPMLNVRFISVNDQVDSFLDPRSMNNLVVPFKNIINDEYCRDISNKVRASLDLKRRQGKFIGSFASYGYRKAPDDHSRLLIDEPAAAVVRDIFDWFAGGMSVLGIAKRLNAAGVPNPAAYKRAQGMNYRHPAAEKLDGLWPDSSVRRILKNRLYTGTMVQGKNRIKSYKLHISEAVPEEEWIAVEKTHEAIIPSDLFERVQSLFERDTRTAPAKKEVYLFSGFLRCADCGRAMNRKQISQPYGDYHYYICSTFKKQHSGACTKHTIRSDRLEQAVLETLRHQIALAVEMDELIATINQSGARNRSVKHLVDERVQLETERSRIEQMKLSLYPDWKAGDISRDEYHRLKEQFEQRQAKLDARIISIQARIDEVQNGVDETNSFLSQFAKYRNLQKLTREAVVELIDMIYVHEGGSITIRFKFSDAYAAAKDYIQDHGQTA

SEQ ID NO: 462 - protein, 520 aa, synthetic construct
MHTNLSNGLYSIYLRKSREDMEAELHGEGDTLLRHERRLMELAKKMNLNIGQVYREIVSGESIDARPEVKKLIRDVEQGKWKGVLVVEVERLARGDTLDQGIIARAFTISGTKIITPLKIYDPANPSDMEYFEFGLFMSRREYATINRRIQDGRKISTIEGKWIYGDAPYGYERIKISNDKGYTLKPLEEEAAAVLLMYQWYANEHIGSYTISIRLDERGYRNRRGEKFSPSSIRDILKNPVYAGYVTWGKRPEVKQIEDGHVVKKRIQGGPEMILKRGLHDAIIPQELFDAAQAVRSTRAVRPNNFVSGSLQNPLAGIVCCACCGHTMRRQKDNKGTDRYRLVCNTVRCENISSRFDLVEDAVIDALQAWTDNYILKLEKHTKETDTFEEDLERLKNERTTLESQKGKLFDFLERGIYDEDTFIERNKNLAGRIEEVQQHIENLIARHQEQAAQMSTEEFIKQVQHVQDAYGSCSTNEEKNMLLKSIFKRIDYVKKEKGPGKETAFSLDFYPVVDFSRH

SEQ ID NO: 463 - protein, 580 aa, synthetic construct
MRKHDRPKSSTTFRCAIYTRKSSDEGLEQEFNSLDAQREACEAYIVSQRHTGWIALPDMYDDGGLSGGTMERPALQRLLADIRASKVQIIVVYKVDRLTRSLAGFAKIVDVLDTHGASFVSVTQQFNTTTSMGRLTLNMLLSFAQFEREIAGERIRDKIAASKRKGMWMGGNVPLGYDVKDRKLIINTREAESVRAIFQRYAELGSVSLLKVELDRLGVVSKRRAGAGGCLAGGKPFSRGALYLLLQNRIYRGEITHRDVAYPGQHDAIIDEELWRIAQDRLATNRQERRLAAGAEAPSLLAGLIFDADGAHMTPSHAAKGAKRYRYYVSASLLTGGRAASGIRVPAGDIEGLVLDRLRQLMASRSELGAALAPLDLDAASFDAALNKASDLSRRWLTLTPIDIAALVRRIVERTQVNLNGIALQLNRGEFASALVGDDKATYKHTDPILLSIDATLKRAGKGKRLVIDNEIAPEINQELVAVIVEAFSIQKQLFSGANDSIEAMTQRLGAGKGHLTALVRLSYLAPDIVRALLEGRQPIELTPTRLLKLSKDLPHDWREQRRFLGFVDRPSPTGDRTAL

SEQ ID NO: 464 - protein, 513 aa, synthetic construct
MTTLTSSNTAVLYLRLSSSDDASTSIDRQRQDLLDLAEREGLAVVAELADDGVSGRKTRANAQEALRMIRDGEASHLLVWKLDRWSRQGIAALGDLVDTLDARPDATFIALRDGLRSDMAAWRIIAAVLAEVARIEAENTSTRVKSSQAHLLKVGRFRGFVPPFGYRSAPNPDGPGRILVQDPVEAAIVRELTASLLSGASMTELTVRLQREGVPTTKSPARKARQHHLPTEGLDSGLWHLTVLRGILRSDTLLGRTTHEVNGRRVPVTDDDGVPITFWEPIIEPATLALLRERLPVDSGKLARRTRAARVLSGVAFCAVCDSKLYVVRSGAHVFYRCAAKKPDLVPPCPCPQLRADALEKFVEERLLRLIGAQPEVEEVRVVENPEAAADLADIDRALHDATAALMSDGVDASAVMGRIEALKARRAALREQPAAVHTTLVPTGRTLADAWHAADPATPEGVRARRTLLLREVDHLTLAPGSSRADPVAERVTVLLSREDEYAALSAFEVAG

SEQ ID NO: 465 - protein, 609 aa, synthetic construct
MIRAVIYCRCSTEEESQKNALEKQVAEAESSVRQYGWVLVDRYVESRSGTTAKGRNEYKRLFNDLLTDKFDVIVIKSQDRLMRNTKDWYLFVDRLCTEQKKLYMYIENKFYSTDDALITGIKAILAEEYSRELSKKINNAHRNRQRDGGNVMLPGNAYGFKRMPDKSVALVEKEAEIKREMYRLCAAGYGTRTISTIMRNRGIVNRDGKPFTSSYILRMLRNPINKGTAVMGKYHFDFDSKRTIKNPKEKIYIHEDKVPRTVSDELWNAANEQIDKRSVKTKDGEDDIGKNPGKYQPSGKIVCGMCGQPYWRKVHRKHSNHELIYTWACSSYLELGRSDNLRARPNLRKVFLENEKGCDNINIAENEFYAVLEEICSNQYQKNKKKIIEKIMKLLSKSLNNQDGTKEIEKLEREQEDIERKMKFLVDKLIDGVLTDQMYKTKQEELEKKRDQNKKKILELTERTSNTQNIKDRLQEIETRLNDDDLFKKATIDDMLEEVDKIVVYPRYMEIYFSLSSVTGCMDLKIFDGDKKCFRVDYGNRLDYKGRQCDAREVVVDLIRENPRITGKMIAKEIGCSLSGANYKLKVLKKEGRIRFNGAGGKGCWEILE

SEQ ID NO: 466 - protein, 558 aa, synthetic construct
MTTFEKNTNSPDISELGLSKKVAIYARVSTIEQAEEGYSIDEQIRVLTEYCEREGYRVYEEYVDRGISGKNIKGRPAVQRLLIDAEQKKFDVVLVWKMNRLARKSLDLMNIVEKLNHKNIAFRSYTEKYETETPTGKLQFQMMAAIAEYERNNIAENVKMGMIARAKEGRWNGGQVLGYDVIEIPNDNKKRRDTKLMINETEAVIIRVIFQMYTSGHGYKSIANCINKKGYRTKKGKTFSLNAIKTIVTNPVYAGYIRYNVRRDWNEKRRNNINPDPVIQKGKHEAIITEEEWQVAKNVFKSRTRKPNRIHDGEFPLTGIMRCPACGAGMVICRTTNRRKDGTKHVLEYYVCGAWKNKGTLVCRSNGVRTNYADKFVLEKLQRLMNSDSLIKELVKSVNERNKKMFAPLQKEYDIYEKQLKELEQKRSKIFDAYIDEMISKAMYNDRVEKIEEEIKHLKNLMEPLKQQIHGNTTEDVSYKIVKEVLVNFSRAFQSALTREQRKRLLHLLIHKITIGEDREIESIQVKLNNEILKELKVGADDLSVDELSAPFSVLVAI

SEQ ID NO: 467 - protein, 499 aa, synthetic construct
MPAETTLRAAIYARQSIDVEQGIQQQVAACDAEAKRRGMAVVENYRDNDVSGTKERGPQTAWAQMLRDFDAGLFDVLVVNDVDRLTRRLADVLEVRPPRRAMRVVVVRGGIDTADPTGDFVFTQFVLLAEREVRVKTQRAAAYAVERRKIGHPPPGATAYGYRWVPARERDAAGTRFAIVPKEANVVRRIFAEFKAGGNLGQIARDLREEGVSTRKGGKWHTSTIRRILLNPIYAALLPAPQPSGQHSVNYADIETCVPGAWDPIVSVDEVVLARAALLSRKPQHNGTARKWLLSGLAVCSECRAPVRSARGEAHPTTRKDGGRAKSRRYHAYRCTNGHFMRNGDLIDELAAKVAIGRISADDAADLLAPNESSDDIVALRTHIQALEERQASIANLIASGKMQPTAANNALDTLKDEISQTTIRIAEATANDPLADVVGLDDAWRWWDEATLNRRRALIEALMTVVIHPIGKGRRATTIDQVAQTVSIEWKDPSKHRS

SEQ ID NO: 468 - protein, 626 aa, synthetic construct
MSVDTEQIHQEKIAYSYIRYSSKRQEFGDSFRRQTQQTKDFCEKFGYTLANQFEDLGVSGFKDDQEALQAFIRDCESGKIKKGSLLIVESLDRLSRKQTKIALRQLLQILEYVDVYSHHEEKFYRSEADNSDNQMIDLMMSIMVMSRAHNESFAKQKRLKEVWATSRDNAIKGVKKAKGSLPHWLSLSPDATKFIVKEERTDIIFTMFELSASGMGSTQIIKFLNKNIDKYPSPSPKTKLWVRSTVKNILKDKRLLGEHQFFKTDPTNIKKKIPAGDVIPDYFPQVIDEELFYEVQAGMRSRKIKAGRVSSTHFPNVFRHILKCGSCGASMSYVNKGLMNAKVRKPTKYLACSVAKKSDECSQNKHFRYDPIEHMMIHLASANGFMPKVESSADLTVRYEKLLDTHEKEQKQLEMLLSRDLSSTTVLNKIEALDSSVKHIASEIQMLEDLIAANKGQYEYEDLYRDLVLLDDEVMKYSNRAQFNAHLQQDIKEAVLFHEYDTPYLAFKMKDGVVHTAMLDQQTTFGGCTLADGSNTFKRLEGQNSVEDDERLWELLKYFGDIADDLKQADLYEHHRKEVQEVMQKLSFKISKYVQEPFNEGLFEEIYQLSDRVYEEIGKKEKIFIG

SEQ ID NO: 469 - protein, 507 aa, synthetic construct
MRYNLACNNGLGVPSNGGEEVKVATYVRVSTVFEEQDSSIINQEEGLQDYYRKKGWVLYETYGERGSSFKKREAYDRLIRDGKTKRFQIILVKSLSRFGRNIGKLNTDITNLVEIGIRFVALSEGIDSNNNDWQGKLAMYSMVYHMQSQTTSEFIRIAERARAKRGEFTGSYTPYGYQRVNKKLNLASDDTPSIVQKIFNLYQEGILGMQAIANLLNDKMVPTPAQKHGRKRGNTLWGQSTIEYILTNPVYVGDLVAQREQAAALGSSKRKKKNKEEQVIMENNHPPLISREQFQVVQDLIQRRSHNKVSGLPNLFTHLMFCADCGSGMHCVKRPYGKTHYMCGKYKLRGKGFCSRHSIYEHELVELILTDIKQLKGGHVESDYLRRELQKEAESKKRTSSSEITFLKKEVEKLENRKQNAEDKWLDGDITKDQYHEILERLSETLLTAKQKLSNIQKENENKKLTLPDITKLTSFEKLDRELLLMLVKKIEVKESGNVNITYNFKV

SEQ ID NO: 470 - protein, 570 aa, synthetic construct
MVQAYSYIRWSSKKQSTGDSLERQLDYARKIASEHHLELVEIVDKGVSAFKGKNASDGELGRFIDAVEASRIPSDCWLIVENLDRISRSDVLQANELFTKLLRLGVTIVTGMDSKVYSYDSVIANPMDLMYSIMLFMRANEESKTKSSRTIKNALGMIRKHQEGVRSNDGYPFAIEVVGSHPFFVDTSEGVVKPHPVYFDAARLILTKRADGWGTNRIKKHLDASIPPPLNRRNKTLKTWSHDTIRRLPHTEQILGIRRVTLEGIEYELKDYYPRLVSDDEYQKLQYVLSKRKVNSTSRNHVGLFTGIKVGKCHHCGGTLCVYRASRRDRAVTETLRYACTNKQKGEPCKQRTFAHTQIEDALIRVGMMKLWKPTDNESFDTTELDVKRNHLEDLNQQSSNLATNFALLNPVPQSMVDKMREIQGSIEIVEGEITQLELLQAEHEHKPSSTGIEKVFRELSPSIMDIKNDADRIKVRELIRDAVDTIMLESLDGSQRAGFKMTLNWSDGSIDTVIRKGKAILLDKGHGLSEDDLYQAVDVMSEWDFEMMEERPLNEFKVVSGENSVTHRY

SEQ ID NO: 471 - protein, 398 aa, synthetic construct
MKLLVTYIRWSTKEQDSGDSLRRQTNLIDAFYAKHKEEYYLLPAHRYVDKGKSGFHQQHKAQGSDFRRMFENVMSGVIPEGSLIVVENFDRFSRADIDTAIDDVRQILRKGVSILTLGDGELYDKSALTDPVKLIKHIIIAERAHQESLVKQKRIAQVWNHKTQLARELKKPMGKQAPGWLELSEDGSHYIVDEDKASLVNIIYDKRLSGMSMFAICKWLNEQGYPTINQRKVRISKTKKPDGNWSALSVKHILTSRSVLGYLPAKISSEDRKTVLREEIEGFYPQIVTDSKFYAVQQLLEETGKGKTSSGEHWLYVNILKGLIRCKCGLVMTPTGIRKPVYQGTYRCNGNKESRCSYGTVSRKLLDTQLCSRLFSKLSQLHDEATDTAKLDVTCPHD

SEQ ID NO: 472 - protein, 465 aa, synthetic construct
MNVAIYCRVSSQEQANEGYSIHEQERKLKSFCEVNNWKNYKVFVDAGVSGGTINRPAFNNLLANLDKFDLVLVYKLDRLTRSVRDLLSLLETFEEHGVSFRSATEVFDTTSAIGKLFITIVGAMAEWERSTIRERSLFGSHAAVREGNYIRVAPFCYDNIDGKLVPNEHKKVIEYIVKKLLEGVTATEIARRLNNANNYPPTIKNWSKTTVIRLVNNPVMRGHTKHGDLFIENTHEPIITEHNYKRISERLSSRVNYKKQTHTSVFRGVLECPQCGHKLHYFKSKLKNKSKTYYSEGYRCDYCRTDKTARNIAITFSEIEREFIEYMSNIRLSDNYGIEVEPKNEVIKIDINKIMRKRSRFQEAYGDGLMTKEEFKQKMKETQKLIDEYEEAESKNDVDDHITKEQVQAVQNLFRHIWDSPNVTREDKEEFVRQSIKKIDFDFIPKSKVNKTPNTLKINNIDLHF

SEQ ID NO: 473 - protein, 480 aa, synthetic construct
MRASIYTRISADHVGGGLGVERQRQDCEELATRLGWEIVEVFSDNDVSAYSSKPRPAYRRMLEAIEQGRVDAVIAWHTDRLHRRPSELEEFITLVEQHGVAIQTVKSGNLDLSTSAGKMVARLLGAVARAEVDSARDRMVRAHEQAAANGQWRARRRVFGWVKGGSEVVPAEATAIQAAAKAILSGTSLRAVARQWNEAGLETTGSAAKFDASAVRDILASPRCASIQVYKGREVGKGNWPSILTEDEHRALVALFANPARRRSVSYERRYPGSGIYRCGVCGAPMESHSDAKGERSYRCTESTSHVSRRSTTLDEHIAEQVLKRLARRNAHLLLERREDGVDLGALQVERDGLSERLSQLAGLFAAGDIDAAQLRDGTAALRTKIEAIDAKLAAAQTSSPLAGLVMASQSGFLVEQLWNDLSPDVRGKVIAELADVTILRAPRGQRKFQPEFVKIDWRKPLELTPEEAAPIVKLVQAGR

SEQ ID NO: 474 - protein, 497 aa, synthetic construct
MTINNVAIYLRKSRAEDGLTDAESLENHRNVLTEIAERNSWKYEIFEEIGSSMSISERPQLRILLDSVTNKYIYDAVLVMDVDRLSRDRYDSSLIMKILRDNDVKIVTADGKITNLRDENDALMTDFKDIFSNYEYKQITKRMIRGKEASARKGRWSSGRVPLGYVYNKDTGMLDIDEDKAPIIREIFHMYANGTGTHFISLEMNKRGYRGAMGKPFGGKSIRDIITNEIYLGNATLRKFIKAGNTYKLRPEEEHIRHEGIYPAIVEKELFESVQRRYESQKMKPNRAKAGTHSLSGLVRCGYCDKVHAIQTRPTKGKVLKGCSKRDLITGVLCKNHGILYEKVMEEVFKDLSKYSATLDETVERLLEDKTMYLNSKDRELEALESQLKTIEAQLKRINYMFMNDLLSEEELGEMKPQKVKEKDHILKRITEVKELTVDDKLEEYEKVSKTLKNILDNREVLSDKDLNRLLSSVINRIVLYNYKDKDVEPRIVIEFK

SEQ ID NO: 475 - protein, 471 aa, synthetic construct
MTVGIYIRVSTEEQVKEGFSISAQKEKLKAYCTAQGWEDFKFYVDEGKSAKDMHRPLLQEMISHIKKGLIDTVLVYKLDRLTRSVVDLHNLLSIFDEFNCAFKSATEVYDTSSAMGRFFITIISSVAQFERENTSERVSFGMAEKVRQGEYIPLAPFGYTKGTDGKLIVNKIEKEIFLQVVEMVSTGYSLRQTCEYLTNIGLKTRRSNDVWKVSTLIWMLKNPAVYGAIKWNNEIYENTHEPLIDKATFNKVAKILSIRSKSTTSRRGHVHHIFKNRLICPACGKRLSGLRTKYINKNKETFYNNNYRCATCKEHRRPAVQISEQKIEKAFIDYISNYTLNKANISSKKLDNNLRKQEMIQKEIISLQRKREKFQKAWAADLMNDDEFSKLMIDTKMEIDAAEDRKKEYDVSLFVSPEDIAKRNNILRELKINWTSLSPTEKTDFISMFIEGIEYVKDDENKAVITKISFL

SEQ ID NO: 476 - protein, 551 aa, synthetic construct
MATKAKVYSYLRFSDPKQAAGSSADRQLEYAKRWAAEHGMTLDAALSMQDEGLSAYHQRHVTKGALGVFLAAIDDGRIPAGSVLIVEGLDRLSRAEPIQAQAQLAQIINAGITVVTASDGREYNRAGLKAQPMDLVYSLLVMIRAHEESDTKSKRVRAAIHRQCRGWQDGTWRGVIRNGKDPSWTRLEPETKTFQLVPERAEAVKLAIRMFRDGHGAVRIMRTLAEEGLQLTNGGNPAGQLYRILRNRALIGEKVLEIDGDEYRLAGYYPSLLSAEQFADLQQATEQRAKQKGTGEIPGLITGLRISYCGYCGSAMVAQNLMNRGRREDGGPQHGHRRLICVGNSQGMGCAVAGSCSVVPIEHAIMSYCADQMNLARLFEGGDRSEALGGRLAIARARVADTTAKIERITDAMLADDAGDAPAAFMRRAREMEAALAAQQAEVEALEHEMAAVGSSPTPAVAKAWADLQEGVKALDYDARTKARQLVADTFERISIYHRGTEPEQTRSWKGTIDLVLVAKRGSARVLHVDRQTGEWRGGEEVRDLPDDPIQ

SEQ ID NO: 477 - protein, 404 aa, synthetic construct
MSGKPLTTVIPYGYKKNETNHDEWLVDEEAAEIVRKIFHLCVEGYGPTQIANILFSEGIPTPTEYWQSQGRKTSALPSVPHKWTARTVADILERQEYIGDTVNFRSTTRSFKDKTKIERPKEEWKVFENTHKAIIDRETWDLVQTLRANKRRPNRTGEVSMFSGLLYCGDCGEKLYYSVTNNYSREQAYFFCSSYRKNTANCTAHYIREKVVYALVLESLRRVLFYVQAFEKQFVQEQLEKSIEEQKKEFAKKCRELAKSEKCIAELDVLFQRIYEDNVSGKLTDERFTIMSESCEAEQKSLKETVVMLRNEINAQDDKTSNVLAFVEKVKEYTEIKELTPAVVNEFIDYIMVSKKQVIDGKTVYPIYIYYNGVGIITVPSAEEYEEMFQERLKQKRAKEQKTA

SEQ ID NO: 478 - protein, 530 aa, synthetic construct
MISAIYSRKSKFTGKGESIENQIQLCMDYAKNLGINEFLVYEDEGFSGKSMDRPKFKEMLKDAKDKKFDYLICYRLDRISRNVSDFSTLIEDLNKLNISFVSIKEQFDTSTPMGRAMMYISSVFAQLERETIAERVRDNMYELARTGRWLGGMPPYGFISTQINYYDENMNQRKMYKLKVDEDTIEIVKLIFDKYLELRSLSKLYKYMYENGIKGTRGGNLDPSALSLILKNPAYVKADKSVVDYLRKSNIDVMGDIDNIHGILTYAKNTDSPIAAVAKHKGVIDSDKWIEAQRLLNANKVKAPRAGTGAKALLSGLLKCSKCGSNMRITYKNSKSGTIYYYICGTKKSLGVSACDCRNIRSDKAESKVIDELKNKSIKSIMSSYKDSKLENSKNSKNIKTEINSINNQIKEKETYIDNLVMQLAKVTESSASTFIINKLESLNNDLSNLKSQLESLNTMSMENKQVDININMLIDNLNKFNKEIDTSDINKKRLLLSTVVDYMTWDSDTDTIKVNLIGINPSNTIASGK

SEQ ID NO: 479 - protein, 593 aa, synthetic construct
MVGIYCRISGDKMDGIDTSIEYQEERGIEFSGKLEMKYEVYKDINVSGKAEIFSRDEFHRFIGDIKAKKITHVFAIHQDRIERNPDTWRYFVSTILNVGAKWYPEGKFYDLDSTTNRAMANLLSVFNEMHSDKTSDAVKVAFYRNALKGKTHGVNAYGITKDDNGLMVHESEEIKIVKNIFEWSLNGIGAYSIAKKLNELNVPTRFAKLNKHRTTIEVSTGIKIKHKNKLWWGSTIHGILKKKLYAGIHIWNKEEISLPHLAIISLNEYNAIQKNLKKNKRTKSGKKPIYKYLLNGLVFCKECGFMYKGKRRLSDRRNQYICSGKQAPLHVCKGGKGFNIPRFETFIIKHLFLSKNLQKRLNNIEVDTVEIDTLTFKNNELIRKLKSAEKLETKAFNYLFEDEDDLSNDARLKAKYKEAKDKVFKYKESLEQVKTELSIQNDNNRLTRVNSAIEGFKIDSGFEAIKATVQQLIESIEVMYIPHEKNGEFWFVIKYKGFNETSVWKTNQQLIQYNLIGYQKTSNTLTNTIPGFTIPKEFKDFMDSDPYRKQHFEELIDRLKKSDEQNQNKDYVQMEFGYLDTIKITKNELIIFD

SEQ ID NO: 480 - protein, 483 aa, synthetic construct
MTKPIRAAIYTRISLDRHDEAGVERQEDLCRKLAAAHDAEIVDVFIDNSISAYAGGRRPEYERLKAAIAAGTVDRVYAYASDRIARRVRDLIDYLDICTPGGVTTHTVTGEVLDPASSSGRFLTTIMGAVAEQESALKGERVRAARRQAAERGLPRVHRRSFGFTADMEHVETEAQAIRDGVDAVIAGQSLSAIARDWNGRGLTTVRGAEHTRGSVREILMKPSIAGLSSYLPTRPDGHKYRADRQIVADGQWTPIVDRDAWEKAMVILSDPNRRHAGVGGAEVRSPLAGVVICPCGDAMYRRTRKSQRKGSPRRAFYSCRRSTPGRTHATIGAEIENIIAAAILDRLEKPNAADVLAAALAPGDAAATLITERHDLIQRRDDLEEEAVAGRLAASVFSRLSSRIEADLADLDQRISDAATGPAPAVLDAARAPDVRAWWANADARARRDVTAGAITRIDISPGRPGAKKFDPERVSITWRTD

SEQ ID NO: 481 - protein, 518 aa, synthetic construct
MHQRAILEKYAEDNCFPNVRVFIDDGYSGVSFERPGFQEMYKLIEAGKVGIVITKDLSRLGRNYIEVGNFTEFVFPRYGVRYIAINDNYDSLFSDNNELAPFKNLFNEWYARDTSKKIRSVFKAKAERGERLNDRIPYGYRPDPASGKKYSLLVNEETAPVVKLIYNLCAEGNGPNAIAAILKEKEIYKPSMYRYLHDGFLGKTDINDPYGWNGKTVGNILDNEVYLGHTVMWKSSVVSFKDKRVVARPKEEQYRFENTHEPIISKETWDIVREVRGGKRRKTSMGEVSKFSGLVYCADCGCKHYFVRKRAWKPENFGFICSRYRKHLGEEICTPHKIRESVLDVIVLEEINKALYYARNNTKEFVDYISRKSSSQARRELNAKTSELAKAEKRIKELKSLFKRLYEDNVLGRISDEQYRMLSADYNDEQKELESKLPELNKEIAALNSECTNVQHFMDLAKKYVCITELTPEILRTFISKIVVHERAVKHSKTAPQQIDIYFRYIGNLAEQKNEEVA

SEQ ID NO: 482 - protein, 556 aa, synthetic construct
MKCILLVRVSTEAQSYEEQENELYDLAHFYGYKDKNISSIATKESAIKLDEEERFGLNRMKELLETGEYDCVFAWEISRIARRKKILFSILEYLTTKGIQLIIKEPRIRLLKDDRTIDEGAETIFTLYAQLAESEMRNKIARFSRAKKEGYNKGKYMGGKIKLGYKVSEDGYWEIDEEDSKLVRLIFDMYISGEYSLAELGKELKSRGYFKNLSITNVKAEMYGLLKNPIYRGIRTSNNIYPQIIDDDTWEKCRKKREENRTRPKAKTPHLLTPLIRCSCGASYSVNLMDATYSCRVKHNAVEKGLSHSPDININMIESLAWYVALQELHEDMINKRNNAKENYEKEIQVYNQKIAHSREVLESTMQRRSDLDENYFVHGRFTKEKYEELAQKQNDIIKVEQGNIRKYEAAILNMEKQIQADITFDDMIDSLNQSYETLKNGTDIETMRKITHRYITDIYIEPWEGKATSFWKKVTIKTIHDTDKKKKIEQFKEQGLDGIIFTLKDMFYVNTLHKKAYWNEDMMNCVPMVYIERITRKRGKRTKKKKMGIRECRKS

SEQ ID NO: 483 - protein, 584 aa, synthetic construct
MTIKAYSYLRISSDRQKQGGGIKRQMEASAKWAEDNGYELAETIADEGLSAFTGTHAKRGGFARFLAAVDSGAVARGSILIVESLDRLSREKVMDAFDQFRDIVKRGIHIVTLVDGQVYSEDSMNQNIGQLFMSLGVMLRSHDESATKSQRGKAAWQQKRAAAAESAKILTKNAPAWLELNEDRSGFLVKQPHGQTIQKIFDLSINGMGAYSITRFLNENIEKYPTMANGSSWNDAYVIRILKNPAVLGKLTLTEKIDGKRVPTGEVVDGYYPTIISTEDFSLVQAELRERKTGAAGRKGEHFANLFSGIAECGNCGGGMLHRNKGKEPRGYRFLRCSNSLKGNGCNCPAWRYDEFESQFINFVKDVSFAEVFSGKTADTQMVELRGRKAVELDKIAQAEQKYLALVEQFTDANLPEMLKESLIKKSVELENEIVAAKEAVETIDAELTKLSTSNVEADQSEFLESYEQLLSGDKDKLREVRFAMHSILRRNIDSISVNNGTYFEPWEEIPDSLRAELAGKGIISQNDIEGYLSKPHGKRLRDKHDRHFLVHFKNGVRRRVGAEYSLLDVSKSDLALIEKFESK

SEQ ID NO: 484 - protein, 519 aa, synthetic construct
MNIAAYCRVSTDKADQLNSLEAQKEFFSEYTKRTGDTLVRLYADEGISGTKIKNRKEFLRMMSDAEHGLFDMVVVKDISRFARNTVDLLQNVRKLKSLGIETQFLTANMTSMGNSEFVLTIFGALAQEESANTSKRVKFGKKMNAEKGRVPNIVYGYDKTIGDYFNLAINKEESKVVQQIYKWYTEEGYGAAKIANMLNEKGYKTKRNCKWSQNATCRILTNEIYTGKIINGKQEVSDFLTGQRRDKDETEWMVVERPELRIIEDETFEKAQEILRGRHDAFNLSHERQSNKHLFSTLIKCKECGWSFRRTVRTYKNTYVRWVCSGRNGRGVDSCPNKTVVDEEELIEVLQEYFTNVLKQKKKVIAHVVNEFQRVYKAKDENVEYEKELNAELAKLQKTRQKYMDMYTDDLISREELNEKIGGSRQEMERIENELKMVSYHLTKGEQLENILNNTFKEIEDITDVHQMTNQQLKRLIQKIEVDKDGNVDIYLRLLGDLGLDESVLIDENETVQKCNNQT

SEQ ID NO: 485 - protein, 567 aa, synthetic construct
MEVKKDTKRRVIAYSRFSTKRQEHGDSLERQHAAALRWCTQKGLELDTELTFSDHGRSGFKGHNSKKGALRVLVDMCKEGQIQTGSYILFEAFDRMTRMPIIEAQNLFTELLSTGVVVVTLNNGKEWRHKNLRNISDFLFSVLDLFRGNQESERKSAMLRSAFRAARESGDKWKFASLPGWIGKEGGKKDGAFVVKEELAESVVKVFDLAALGFTSKDIAIRANAENWPIPARLQQTEAWTANMPRRLLLNRAVLGEHEHKQYYNEIEDDEGDVEVEYLSRGKSTGIVVKDYYPRIISDELWAASRVGIKVRGAAPKRDYNKLNFWSGMIFCGTCGAAMHRRQDIKKSGDSIKGTMYCSAKKDGRSNCKPMAMRKFDTTVLSAITTFAASELGNHVGQSSLNEEAEALATLLADAVLRRANVMQAIEKMGFSDAFHERYEALEKEVKELEAKLTATREEAAFAASGSMLDTSFLESVLPHIYSLDSESADIRAALFLKLNRLVDSIIVFPYDLAVVYFRGESHRLTVPLPHKSHVPKPQHKQAELFSTGSVEHAAIKRPVYQSSRFR

SEQ ID NO: 486 - protein, 503 aa, synthetic construct
MAKKEDIKNVAIYLRASRDEENKGIEEALQSQRMLLTEMCETREWKYTIYEEIASSVTMQRSQLNSMLEGVEQGKYDAVVVKDIDRLSRDEFDSSDIKRILYRSDTAIATPPNTIYDWTNRQDMLLLNIKTFLSAQEYEIIRERLMYGKLSASKRGFWAHGTPPFGYKKNHETRKLEVDEDMVKHVHYIFNSIVEGKSVSEVRQELNKLGVKTKEGKKFSFNSIFRIINNEAYKGTLVYNRYKVTDEMRRDGKKKKTIELPKDEWERIEDAHPAIIDKATWEKANEIVNTYSFAKKRKSSTTYPTSRFTYCGTCGGTLTFQVAHTGKLYLKHCLKCGNRTYQYNPILEGIREKLIPFHQKLVDSITVLEQTGKDENIEYKKEQLDKRIKSVEVGIQRLLPAYQEMIITLEEFKEAKAKGEAELKQLHQELDELNKLDPTEQITNLQELKKQVEQLFGKWHRLDDEGLNDEDLNKALNIIIEKVIWTYPKGENVEPHLHVQFRM

SEQ ID NO: 487 - protein, 554 aa, synthetic construct
MYVNWLPRWSLFCLGHVMNTAYAYIRFSSEKQSTGDSVRRQQALIDSWGKNNPDYILSQKIYKDEGLSAFTGKHAAGDLGRLMNDISNGSITAGDVILIESLDRLSRENISTATDRLKAILIHGVNVVTLTDQKQYTPESLNSPMDLIMSILTAQRAHEESESKSKRMREVWAKKRTEAEENGKIITKSCPRWLTVNSDRTGFDPIPDRVQTINRIFSLRVKGESLSAISKILNEEGRLTFTGKAGKWNQSTIQQLVSNRALIGYKVQSRNSVVNHPDIPNYYPVVVDLQTFQAVQQLKSDQFGKKQTSDIPALVNLFKSVLRCKECGNIMILNSVTVNRDGYYVCSMRRQGRCEAKPINRKATDEALVNGLFYNLDRLMLSKPEQNPVTALEAQKQDLTERLNNLVVALEVAPDITEIISRMNAIKGDIQAIESQIAKHKQRIQSHISETVQGLNLLVKADRVEFQLVIKRHVETILINTLKKSADIHMFNGLKLCNFPLDRVVDGAQWLEVLPLIDGDEFDFEGFTTKPRHIALEEAPEWVKETEEQPSQPL

SEQ ID NO: 488 - protein, 536 aa, synthetic construct
MKKRVWALYRVSTDRQVTEEDIPMQRKAVHQFMQSKSNWVLEKELSELGVSGYKKSVSERDKIQLIKKGAENKEYDILLVWKDDRLGRNKFEIPFMLEYLKKNGIEVWSVVDGVLNKDERHEDSLVSFLRFWVAEGESKKTSTRVTEAIKQMNEEGKWTGARVPYGYEVYDTNQKHPKHEKTMKNIRINEEQSRIVKLMFLLVLEKGYGADRITNYLNECGIPSQSGVKWRNNVVRRILRNPIYKGEQRYGTTYSNNKLKPVEKIKLKPKRDDLVIISDEIFDEVQNIIDSRKIQKDESEYKVVAPSKYLLLNGLAKCGYCGSRLFVDSSTKTKIKKNGEKSSYTYWRYICREGTNHRETHPKCYFGAKKYDYETEEVIIETMKLIELNGLEEAVNESKKLKIENELIVRKNIIKEIDETKKQLEALKKLIIKIAMGESKLSEEYVEEQINNKEEELKEYQRRLDECNEKIADLENENKKTIKIKSELCNWEEKYRNADWDSKKTMLSKVLDSVEYGDVIKINFNIIINELLKQSM

SEQ ID NO: 489 - protein, 528 aa, synthetic construct
MPDKVLAFYIRLSSEDRDLKTNALKNESNSVFNQRRLLQDYYDTHESLHGYKVIVFCDDGVTGTHFDRPKFDELIEMARNQEIHCIMVKDLSRFGRNFLEMGNYLELILPLYGVRFISINDAFDSDDYLGVTGGLELALRNLINNMYSRDLSTKVRSAFRTRNLRGEYWGGNGFYGYQVHPHNKKRLIVDEQVRDIIVMIFESCVAGMTTSEIAQMLNDMGIPSPLEHKRRNGGFYNGVVKEETGIWLKGAVRKILTDERYTGKMITNTRETEEVGKPKMRSVPRDQWIIVPGTHEAIISEELFRTAQNALQGRIRNVNKNTAGNRANNLFVCGCCGRKLRKNPAKEPHLVCPKNDSIKGAECAGLFVNQAQIEQAVLQMLREQSRSFLEQHCLMQACIDKKLSSIQTELDANTNMTRRLQSRKAELYEQYRAGRISREKFADIQKTDSEKLARLSSRAEEIKRLLVEHYESRGNLAAGKRTADQIILLKDYDPEIIRNFVERVRVYPSGEIEIDMRTSSGFEFVTAS

SEQ ID NO: 490 - protein, 510 aa, synthetic construct
MNRPLIKCAIYTRVSTDHQADSTINQEAQGREYISRLGPEYDKTDIIVYRDEVVSGYYTSVFDRAEMKRAIQDAKENKFKLLIFKEVSRVGRDKQENPAIIGVFEQYGVRVIAINDNYDSLNKDNITFDILSVLSEQESKKISSRVSSARRQKARRGQWGGEAPIGYKVNRETKKLEIDPENCYIPKLIFDLYVNHGLGTFKVAEHLNGHGIRTKNGNLWGRVSINRVIRNQAYIGNVVYGTRRNALQREYDDTGKMSKKKVQIKIDKTEWEVAEGVHEPIIEKETFYNAQKILLSKSHGRTPRRAYHPLTGILFCAKCGQGMVCQKRTCKDKEYRYYICKTYHKYGRSVCSQANVNADVLEQDVIDIVKNELNSIPADKVEITGSKTNDIERLGKEIKKNNVKREKLKKDQIDIFNQRELFDESTYQQQMLEIKSQINHIDEEIQIIENQIKVLMEQVAESSTLDYLIEEVKKISLNDPEKLRVLLHDIIKRIELKEKHLQIEFNYDFR

SEQ ID NO: 491 - protein, 584 aa, synthetic construct
MQSKRKPEPTGIAALYCRLSRDDGSESESNSIGNQKRLLSQKAKELGLGSTKFYVDDGYTGTNFNRPGFQSMLDDIDLGYVTTVMVKDLSRLGRDYVSVGHYTDNYFPDRNVRFIAVNDMVDSDEGENEIAPFKNIMNEMYARDISRKVRSAHRIRGNLGEPLSQPPYGYIKSPEDKKRWIIEPEAAAVVRQIFRLCIEGKGNESIARILTEQNVLNPTAYWRERGEGRGGKKTQPNPYLWKHTTVEKILRQQEYCGDVINFKTYSKSFKNKQRFENPEENWVVFKGKHEPIIDRDTFEQVQQKIKKTKRRAPKAENGPKHLLTDYLYCADCHSKLWHHTNTRNKDIHFFSCSNYSGDYGGTCTSRHYVRADAIERVVLLELRRLASFLRYDEETFADILAQKTNRDMLAEQKRLEGELQKAIARNETVLRMYEKLYEDNASGKVTDEWFMQLSHKYEVERMELKNKISDYRQRLSELGSMQQGRDSFLQAIRRFMEMGTLTAPLLQELIDHIDVYETEGKGKHRTQRVVIYYRFVGYIDLSEADFEDALLQQENHRAETRQGVAVEYMPEKPKPEHRPADAIA

SEQ ID NO: 492 - protein, 489 aa, synthetic construct
MSVRLSILTEDTTSPARQELDLRRHAIREGVRIVGAARDLGVSATKKAPWERKELGDWLNNRIPEFDLILFWKLDRFIRRISDLHEVIKWCEEFGKNLISLNDTLDLSSPMAQAMVTFIAAAAEIEVANTKTRVSSHWEYTKQQDQWRIGKPSFGYKTARVGGKLRLIQDPKQARAVRYMYQASMRGVPANRIAKVLDRAKVPTYSNRMWNNQQVLRILRNPAVRGIRTEGGTKAATYKSTPVLDKKGQEIRVTDEPILTDKEFESVQAALATRSKNKRHHAKNRRPTRYLGVMKHDCGRNLNETNNYKTLSTGEVKEYRYLRCPDCRKPGFVTPDPEHVYSSLAQAVFEVLGDYEVIRREYARGDENRRERKRLEESIVYYMSGLEPGGMFDKAGFIREKAESMLDALMNDLTKIDPESTKDRWVYESTGMTYSQHWTTGGVEAMENDLLSAGITFELGKQDDGELLGRLIIPHDVEQRLIRMDNNWS

SEQ ID NO: 493 - protein, 564 aa, synthetic construct
MATANYIKGQNETKITALYCRLSQDDGREGESNSISNQKEILLAYAQRNNFPNPQFFTDDGFSGTTFDRPSFIQMENLVEQGVVDTIIVKDLSRFGRNYLDVGNYLEIKYPTLGVRFIAIQENVDTLKETGTEMMPFNNIFNEWYAAQTSKKIRAVWKNKAANGKRVSSSVPFGYVRNPQDKEDWLVDEPAAEVVRKIYALCLDGRGPSQIARQLEQEKVLIPTAYYASLGRKTRKQYTNPYAWDQKTVAGILVNQQYTGCTVNFMTTTVSYKVHKTVHKPKDEWQIIPNTQPAIIDEDTWKRVQELREHRIRPTATGRTSLFSGKVFCADCGSKLHFCAAKSLNANQEHYRCSNYKSGRGSCQIHFIRNVVLEKIVLEAINSLADFVRCYEPVFLYLMAQKDIVSKRTETSKLKTAIESGKRRIQDLDKLIERIYEDQVLGNISAERYARMSVNYENEQRTLINKVAEDEKKLACIEQTSLDLKTLLKVLRSSTSFEELTPTLVNSLIRRIEVHNNDKSSGHCYVKVDIYFTAIGLIDIPTEDEIKSLMAKIKANPQEYRLTA

SEQ ID NO: 494 - protein, 585 aa, synthetic construct
MDKENTKPLAYSYVRMSTEMQLKGNSLERQKEKSKEYAIRHDLQLVENFEDIGVSAFKGKNIKEGMLGDFISLIENKTVPAGSYLLIESLDRLSRENIFESIPLFIKILKSGIKIVTLIDEQVYGAENADFKDLLYPMVVLSRAHEESVAKSFRVGKAWANKRKNIHQRKLTKVCPAWLKLNTDSNSFEVIPGRDDVVKRIFDLADSGYGSYSIGRILNNEGVFPFSENSKGWHASYITRILNNRSVLGEFQPHKLVNGTAEPDGDIVPDYFPHLIDEEQFLRIKHARRKRLVEGAGRKGPVYRNLFSRIAKCAYCASPMRFVHKGQPPKGGQFLRCTNAERHFECSASNWRYDHFENVFLYFVHELDLIETLKRADEQSERYTLEQKLVSINENIRGKRELLNTTFDMLQTSNASKDFIQSKIEEISSEILELENQKGAVEAKLEKDAALAPVDDQQIKSLIKELQDADDGDLERKRRVVANRLQMMIKSLTLAPDGLRKDAEKLVLSQFGSSEALFDFFETGAQSGEASTGMSFSVVLLDGIMRRVTVSRREPLKVIQLIAVDKHGLIIETEQTHESQGEWKI

SEQ ID NO: 495 - protein, 459 aa, synthetic construct
MQRQEDDCRQLAQQLGWTVEEVYADNDVSAYSGKPRPAYLRMLADLEAGRIRGILAWHPDRLHRSPLELEHFITLVEKHAVRVHTVRAGHYDLSTPSGRAVARTVGAWARYESEHKSDRIRRAREQQALAGRFHGGQRPYGFEKDGVTLRPDEAAEIVKAIDGVIAGVSLRSIVRDMNQRGVPTATGRSQWTGVVLREILCRPRVAGLSSLHGEIVGKAEWPALVPEETWRAAKTILEDPSRRTNQRGGTVRWLGSGIYVCGVCGCRELRASTSGSKRKHAYRCRARDYSGDPGGHVVRSCEDVDGYVEATIVERLKRDRVTDLLVDQPDTAAAAASLRIESAAVTERLDQLAGMFAEGQISASQLAAGTEKLRTRAGEIAAELAELGKRSPLSLVAGAPDIERLWFGTEPDRSDGLALGARRAIVDALMTVTILRAPSGRSRDGLYFDPEYVRIEWKA

SEQ ID NO: 496 - protein, 516 aa, synthetic construct
MSKITAMYIRLSMEDEDVSLNRKEESNSISSQRELLKAYIENHSELKDTKVQEYCDDGFTGTKFERPGYMKLMEDIRAEKISCIVVKDLSRLGRDYIEVGSLLEQILPLYQVRVIAVNDNYDSDNYDGSTGGMNIAFKNLIYMLYSRDLSNKICSAKHTRILKGENISGQLRYGYVKDPNDKHKIIVDPEAAEVVKLIFELTAQGKRKTEVANYLNAHGIDTPSAYKKRKGSKNFFHAVEVKSLWSTSSIHDILNDEVYLGKLIWNKTKKRVGSNNTSTYVPKDEWIVIENCHEPIITQKLFDTAHANSKKYIRPKRGKRNYNPFYYCGVCGRALVPSKRVKGDILLCSSSRIEENSPCKSNRVEIAKVEDTIMKIVNMYATAYLDEKGIKKAGKSKEVSPEEKIATLEKKVKSLSSKKMMLYSDYKDDKLSREEYVKRSKAMVEQIDELHQEIEQLKTEIPPEDNSSSKFETQLESIINMESFDREKIQKIIKKVIINGEDNIEIVWNTDDPFFK

SEQ ID NO: 497 - protein, 566 aa, synthetic construct
MAEKIMQGIKQISELIGQAVKKRVVCLYRVSTVGQVEKDDIPMQKQYCREFCRGQSGWEIVKEFSEKGVSGFKVSAKDRDAIQEIQKMALKGEFDILLVFMFDRLGRRDDETPFVVEWFVKQGIEVWSAMEGQQRFDTHVDKLLNYIRYWQASGESIKTSLRVKTRLEQLTQEGYYTGGRVPFGYQAVKRGRINKKNHEVRDLAIEPGEAEVMKIIFQKYVYEGYGALRLHRYLMDQGLRTKDGKTITMGIINRVIKNPICIGIIQKGESQSSVLPELKIIDEEVFARAQEIVRERVVPQSEVPLTTRGQSLLVGNVYCGHCGARLSLATAGRNYKKKDGTVVKKTYSCYKCYNKAMAAEKCDGQTTYGVSKLDNLVDQIIHIQLQRIQKAPPQALIEKQRDREAEQVKAKAKLLREQYQQKQRDYQDLKEETLKVVRGTSRLNVDLLNNLIEETTVQMAELEGQIRTAEAELREVLSGAEQVRQEYAQLMDWAGLYDNCSFEAKKMIAAQFVKAVRVKRGYEVDIEFNVSFEEFQTLYLEPESEEDRRSRSATYLSLVEKSGQAG

SEQ ID NO: 498 - protein, 508 aa, synthetic construct
MPENMHPLYDRSMTVRNAAIYCRISHDREGRALGVAKQEEDCRALAERLGWEVGHVFVDNDLSASVHGKKPRPGFEDMIRRVEAGEFNAVLAWSTSRLTRRPMEHERLIPLFWERKIPISTVKAGDIDYTTARGRSRARDDARRDAEEAEETSERVERDVQRRAEAGEFHGGHLPFGIDADREIIRGKVKYVRFRHHTTDAPRVRDAARRLLAGETVYGIAKDFGMQPRTLKRAITNPAIAGLREYNGQFYPTPWEPIVDREDWERVCEILSDPSRRTSETNQRKYMLSGLVYCHCGNRMTSTSAKRTEGPTYECSPTKTGGGCGRARIVMRPLEEYIAEQVFTRLDSPDLREAMARESGGVDDKERELRKAVMDDEQRLVELANERDDNLIGEAEYRRRRARLTDRLEANRMTLERTTRKRARTNPPPGAELRAVWADKGSVWKRTILASIIERIDIGPHPVNPDTGRLFTSAPPRRKGEDHEAWRKRFDLHRARVFASRVYVTWLV

SEQ ID NO: 499 - protein, 485 aa, synthetic construct
MSQDRSGEELGVERHEKDCRKLAKKLNLNVEHVYSDNDQSATTGKPRPGFEAMLAAKPKAIVAWHQDRLLRLTKDLERVIDVGVPVYFVTSAENGLDLSSPAGRAVARTVAAWSQYEGEQKRLRQISKNQQLAEHGHWQFSLRPYGYQRVNGTIVQVPEEAEIILEGYERVLKGASYRELAMDWNRRGIKPLLGEQWKGSRVQRMLENSHYGGISSYKDEEVDLDEGKKIQWAPILTPRQWKDFRELKLNRKRKRSWAVTPKHLMSGMLSCGTCGGQMFTHLQDLKARTNTVNAKGHPIRVPVFREDGTRAKTTAYVCFNKHCASIRGEYVDALVRTVVLKKLADERVVKAMRPSDDALPLQNEIADLQRRRDDVTELVGEGLMDKAKAREKLADLSERLERAQAKLTAIREESPLSDIRLSESLPEKWDALAVLEKRRIIADLGLQLTINPASRGVRSVDPETGEKYTERAWALRRIAWELPEG

SEQ ID NO: 500 - protein, 578 aa, synthetic construct
MIDTRNPARPSRTFSRSSVAPALQAWLDEGGTVEEWLNGRTPLISYARISADRLDGDAIGIGRQHKNNTRNAELHDCAVVLHYEDNNITAAKREVERPAFIQMCRDITHGKEEETGIPVKGCIAVERKRVYRLPRDFIAFQDALVMVGDGIFIDDKTSLDLVNDDGTIIAGLVTSGTGEAEVKDIRKRTVRNAADRAEEGKVYGGPRRFGWLGASKDPYRLGNKHKDTVEWPHLIDMIKARYAGRSWRFITREINKKGVLTARGGRFTEQAVKGIITNPAWWGGRILNGELVTDRTTGEPVIGEWDHADEEIDGVGYETWKSIMAGVKANRMHRGMKRDEEAQQTEEELRTRTYLYSGTLRCGRINDFEEICYSKLSGNKATGKNAKYGDYYRCGDVNCKGVGRRVAPVDEFLEGLTLAYLDKHFVGTKVKTIPWRGKEKLANLRKQRRDIKDSVATGSADWSDVHDLLMRLNRTIQTLEKEEKDHLKAESKRNLLRGWSREKWGRMELDEKREVIAQVLTAVVVLPVPEGVSDKAPFDPNLLKVSWRKEALAAKDKEEKAVTSPDQDPAGETAPVAA

SEQ ID NO: 501 - protein, 519 aa, synthetic construct
MYNIARYDALYGRQSVDKKDSISVESQLDFCKYETHGQPYQTYTDKGFSGKNTNRPDFERMMRDIRAGRIKRVIVYKLDRISRSILDFANMMEVFQEYDVEFVSSTEKFDTSTPIGRAMLNICIVFAQLERETIQKRVTDAYYSRNKKGFFMGGRVPYGFKLEPIVIDGIRTSFYLPIEEEMQQIELIYQLYAEGVKENGEPYSVSDIRNYLLEHDIPQLRGGYWTVSSISSILANPSYAIADLSLYEFFHSQGANITNPVELWEGGNGCYLYQGTVSKDKSRNSFKDKEVVLAPHVGRVSSYIWIKCRLRCMNSRQMATTNKGKSSWLVGKVKCGNCGKGLQISPSRVSKKTGKSIRYMNCSYKYITKGLGCSGTGSRIYANELENYVLKQIKGKLAEFEGLNEQNATQTNPKLNENKIRLAQIDKEIDDLVEKVSGANSVLMRYINEKVEQLDAERRALSEENLSMTVNQSSDTLNMIFNHVSTWEETSFEDKQKVLDAFVKVIKIANGNIEMTWNI

SEQ ID NO: 502 - protein, 605 aa, synthetic construct
MIMKNAALLLRVSTDIQDIDSQKEALLPVAKSMGYNVSEEWIFGQHITGKDDIRKGERVSIKKLKELCKTGIIDVIIIWEVSRLSRSGIAGRQFIQDFNEMKIPIYFKDRNIWTLNPDTLEEDVNSKMIIGLYLDIAESELKTLKDRTNRGKRKNVEHGLSTGGFQNYGYKVNPETNKIEIDEEEAKFVRDLFAKYASGKYSTAALTKYANTTSYLPRYNKTSRKGNFRTNSGRERDTSTIRWGRSVITKMLHNRRYIGERVYKDMITKVPAIVDEETFNKAQTFFKKNPNKIEKAKKYIHLLGKKVVCGQCGNSYYSHVGITGSVYLCTSYSSKSKDCDNIRINYEKSEAVIWDYLKNYSYYFKKIDETEKERITNEIDEKKQELLEQQLKINQLIDEENVKVRNLLNLVKNSGGAFKMEDIIQDKINIDREIANYNIDLNKIHSELALLDNRLKQIVDTNLTDIAIERIEADRNQMKKIIDSVIDVITVYKAGVDRILLQVELYGRVVNILMRRRVKVNCRYCFIDNSVAEFQNPMKYEKEMLLPSEIVTMVPVFDVTSNNNEVFDEDIFGGYSFDEMWDILIKYGCYRDYTPLPPVRRECRI

SEQ ID NO: 503 - protein, 523 aa, synthetic construct
MPTAIPYLRFSSGRQAKGSSYERQSDMIADWLRRNPDYKLSTISFEDLGVSGYHGHHLKEESGFAKLRVAIAGGAFGKGDCVIIEAIDRAGRLEPLQMLSLLGEILNAGVEIETLDDGVRYTRESVSNNHLFLLVAKVQQAHLYSQNLSRRLSAAWDSKRKAATSGKSIRRRLPLWFDQETGMLREDIAPLVKQAFEDYAAGFGNRRIYKRLAPLHPEIAAMTPEGMGEWFSNRTAIGYWNDTPDVHPAVIDLDLWYRVQMLRESRKRTTIAAPSKHLLAGLVKCGSCGKNFTIKVNKGKSTSMVCKTKSRLGDKGCDNGKAFPTAVLDKIRIDTSLSLVQEAFTNQNLSSNRKKLIEIEGQLQDVAKGLTALGEAIAAAGDVTPFLDSLSSYKRKREELENEKTLLSRETKDKNILLSGVIDLEQDLLEDDQLKLNALLQSVGYKITVYSDGLMIVEGQEYPFLYKGYNRGKDGYVYMDMGEEKFIKRADQEQIDAFKALRKQAPEPDNILLKLIKRRNGRS

SEQ ID NO: 504 - protein, 485 aa, synthetic construct
MKRAAAYARYSSTQQQDISIEAQFSRIEEFAKRNNYIIVARYEDRAISGFSSRRPGLQQLLADAKLGKFETVIVWEFARLARDRTISRNYKEQFRKLGIELISVTEHIPDSPEGVIIESLYEGMAEYYSRKLARDSMRGLIQTVKDGYVHGGYPPFGLKFVKDEKGKSKYAIEENEAKAVRKMFEMAAKGETLLAIARWLNDNGYKPRRSQKFNVESVRDILKNPKYIGKIIFNKRRGKGKFNPFNEIIEVEAPEIAIIDEDLFIKVQQRLSKNKHKPARRNYILRGLVQCGICGHPLSGAIRQGNNAYYYCTYCWRNNNKKVSIGADKLENIVINFVKSHFEHLDTEELTCRINKKIKQKLNPAALKTFQQNLDEVNNAIKNITKAIEMGAFSNELLIRLNELEREKMKLEKDIRSALTQIKSLRELTTEEVEHLKQSVLKELTNRSTARELLINLIEHITVNFETTEILFTTKFGDYVVKYNK

SEQ ID NO: 505 - protein, 538 aa, synthetic construct
MSRPRIRCAIYTRKSTEEGLDQAFNSLDAQREACEAYIKSQAAEGWVLVPTAYDDGGFSGGNMDRPALQRLLAQVDAGLIDTIVVYKIDRLTRALSDFARIVERLDRRGASFVSVTQAFNTTTSMGRLTLNVLLSFAQFEREVTGERIRDKIAASKKKGMWMGGVPPLGYDLPTDAMTRALVVNEAEAEQVRTLYRLYLELGSVAALAQQLEAEGWLTRVRVSRKGNHSGGVPYSRGALFHLLKNRIYLGEIIHGELSMPGRHPAIVDPDLFEAAQQRLRANAVTHRDRPLRSADLPLKALVHDADGHRMSPSFGYGRGGKVYRYYVSAPLQQGRKIDRRDGALRRVRAEALHEVVEAALAPRHVHADDLPLAALLAPVRRIDLLAEEVRITLEADRLVPAARRGLEPVAGDGTVLALTIPVRCQARGGRVEQVGPDGRQLVHRHRRDPILIKGLRRAHKLASALGWNASDGALRHIDVAAPVGAYDRKLVRLAFLAPDLQRAILEGRQAPGLTLSRLLDEPISPDWGCQRRMFGAAA

SEQ ID NO: 506 - protein, 512 aa, synthetic construct
MRTNEHNFHNIEEEIKHVAVYLRLSRGEDESELDNHKTRLLNRCELNNWSYELYKEIGSGSTIDDRPVMQKLLTDVEKNLYDAVLVVDLDRLSRGNGTDNDRILYSMKVSETLIVVESPYQVLDANNESDEEIILFKGFFARFEFKQINKRMREGKKLAQSRGQWVNSVTPYGYIVNKTTKKLTPSEEEAKVVIMIKDFFFEGKSTSDIAWELNKRKIKPRRATEWRSSSIANILQNEVYVGNIVYNKSVGNKKPSKSKTRVTTPYRRLPEEEWRRVYNAHQPLYSKEEFDRIKQYFECNVKSHKGSEVRTYALTGLCKTPDGKTMRVTQGKKGTDDDLYLFPKKNKHGDPSIYKGISYNVVYETLKEVILQVKDYLDSVLDQNENKDLVEELKEELMKKEDELETIQKAKNRIVQGFLIGLYDEQDSIELKVEKEKEIDEKEKEIEAIKMKIDNAKTVNNSIKKTKIERLLSDVQSAESEKEINRFYKTLIKEIIVDRTDENEAKIKVNFL

SEQ ID NO: 507 - protein, 452 aa, synthetic construct
MKAAIYIRVSTQEQIENYSIQAQTEKLTALCRSKDWDVYDIFIDGGYSGSNMNRPALNEMLSKLHEIDAVVVYRLDRLSRSQRDTITLIEEYFLKNNVEFVSLSETLDTSSPFGRAMIGILSVFAQLERETIRDRMVMGKIKRIEAGLPLTTAKGRTFGYDVIDTKLYINEEEAKQLRLIYDIFEEEQSITFLQKRLKKLGFKVRTYNRYNNWLTNDLYCGYVSYKDKVHVKGIHEPIISEEQFYRVQEIFSRMGKNPNMNKESASLLNNLVVCSKCGLGFVHRRKDTVSRGKKYHYRYYSCKTYKHTHELEKCGNKIWRADKLEELIIDRVNNYSFASRNIDKEDELDSLNEKLKIEHTKKKRLFDLYISGSYEVSELDAMMSDIDAQINYYEAQIEANEELKKNKKIQENLADLATVDFNSLEFREKQLYLKSLINKIYIDDEQVTIEWL

SEQ ID NO: 508 - protein, 521 aa, synthetic construct
MGKREEVVTKLRGVPEGVPSVEEVRATLAANPELKCVVCYARISFDGRVKDAHGIEDQHRDMAEAARRFGWLIVYRYTDNDKSASKESVVRDDFEQLLADLAAGTTPEGHPVQGVMAINDDRLYRRPSDWERYLKAFTSHEDRVYHDSNGMQDLYAEGFEIKGLVGVAMSLSETRKKQRRSRNSHRSRAIRGQSVAAWRPFGWEDDKVTLRQEEAEAIRKAVHDVIAGASISEITRQWKQAGFITSRGNPFQYQTVKQVLLNARICGYREIKGELVRDGDDQPITGEWDPIVTPKEWFAVTAKIRERGGGTGMPRGGLVHKYLLTGILRCGGVLEDGTTCNNKMIGIKANDWLKYKHAYFCKKTVDGGCSKTYKRGDKTDQIIEELVIAKLERDAATKAQEVPDWDKTDALERAIKSRNELERRWHDDEDTDIDDETFFRNLPVLERRIKELRADQRAHEALKAEAEEAQEDIRKSWGSKTLTQQRDAIKKVLSAVIASPGGKGNKAFDPELLKPVWRASE

SEQ ID NO: 509 - protein, 569 aa, synthetic construct
MKAVGYIRVSTDHQDLSRQESLIRQYCQKNNYCLIKIIGEKVSGAKKDRKSLAELHILDKSLADILVVSELSRLSREADYANVIFIINNILQNGLDVVFLDEESKVYKAGKSLDIIDIITLAIGAKTAADERMKIATRMKTGKTTKIQIEPYMYTGGTAPYGYKIIDNPLYHGQIDNIPAKRLITEDEYQMSNVRLVFQMVLNGTTLRDIAEHLNKSGTLTKQNKPFCETSISKMIKNPIYNGRRRFKGLPLVIKKIISDEDWNKAQICVSQNKLFKDIATSNFNPLKGIVFCPCGYALMLHQMSPRSGQKYYVLACCRKNNKEYRKKCRNMGIKSDVLFKSVWNCVKRSLTLTEYSEKSNKKSEQINTIITQLNQQLVNNHKSMDNIKEEMRHIENAIIKVSDIPSLVDKYKIDYKKKQDEISSKEDSNKAIEEEITKNKQQLERIQKSQAYKQLHDMTDKEKSEIYKNVLDRVVYYSETMFTGFIVIDYKNGLQNIVVSKRHYNNLTLLLPTTFKFNKETRKVVIPLHKHDAKQPYNLDFIKEQEFSLAELSSSYDLEEWKINIDDK

SEQ ID NO: 510 - protein, 534 aa, synthetic construct
MKTAAIYARRSKVVETGDSIENQIQLCTNYLKNIGINNTLIYSDEGFSGKNTERPGFVRLMNDAKQKKFDTLVCYKVDRLSRNIGDFSNLINELEKNEISFISVIEQFDTRAAMGKAMMYICSVFSQLERETISQRVCDNMYSLATNGYWLGGEFPFGFSSSRKNFTDSSGKNRSYSELIPIEKEINLVKLIFNKYIELGSLSQVEKYLLQNNIKTRRGKDWSKASIKNIISNPVYVKANDKTIEYFKSQGIKTYGEPDDIHGILIYKKRKGKSGKIRNPDEWIYAVSTHEGIIDSDSWLEVQKIAEINKYKAPALGSSHKALLSGIIRCAQCGSSMRVSYGVPNKLTKKRKHYYMCTLKHNSGKVRCASKNVDGPEVDKLVINKLKELSLDKSYLVQRLKDYKESFATSSENILSKNIQNEISKNKEQIDNLVNNITLTEDPQLVQILLDKLTKLKSKSVELTNSLNKLNDELAKQDILINNCDNIIQKLKNLSALIDDLDVPQKRTLLSSVIDKVFVNGDTGAVKIKFKSFN

SEQ ID NO: 511 - protein, 537 aa, synthetic construct
MKQPIYNTALYLRLSRDDELQGESSSITTQRSMLRQYAAENGLNVIEEYADDGWSGTNFDRPNFQRMIEDIEAGKINCVITKDLSRLGRNYILTGQYTELYFPSRGVRYIAINDGVDSANGESEIAPFKNIINEWVARDTSRKVKSAMKVRFAEGAHYGAYAPLGYRKDPDTKGKLLIDEDTRWIIEKIFDLASHGMGAAKITKTLIEEKVPTSAWLNFQKNGTFAHIFEGQPESKRYLWTIGQVKNLMKDETYIGNSVHNKQSTISFKNRKKIRKPEEEWYRVENTHEPLVDKDVFRQVQEQIKGRRRERKDRTTQIFAGLVKCADCGWSLRFGTNNQNKTPYSHFSCSYYGQFGKGYCSAHYIRYDVLYAYVLSRLQYWSQEAEQDEGNLLHRLLKTGDRERAAAKKKAASELKKAEKRQREIDTLFMKMYEDRAAEKITERNFSMLSTKYQNEQAELSETIQTLQERLAKSEQENSDAEKWIALIKQYSSPAELTAPLLNTLIEKIVVHNAVTNADGEREQEVEIHYRFIGKID

SEQ ID NO: 512 - protein, 532 aa, synthetic construct
MEKNKRVYCLYRVSTKGQVEKDDIPMQKQYCREFAESQGWTIIKEFAEKGVSGFKVAAADRDAIQEIRQDAEERKFDILLVFMFDRLGRRDDETPFVVEWFIRNGIEVWSAMEGQQKMDDHIDKLLNYIRYWQASGESLKTSARTKTRLSQIVQEGRFRGGIVPYGYRLEKQGRFNKKNHEVNEILIDPDEAAVVRIIFEKYVYEGFGAQRLSRWLYNNGYLNRKGTNFANTTIIKMLKNIMYVGILRSGETRSEIFPELQIVPLDLYERAQELMEARTMHHNEVPFNSKGKALLSGMVYCAHCGSKLVLTTSSGRRAKGEPKRETRIRYACHYKIRHPQDCDGQTGYSGEKLDGIIDKIVIQLFERVKTAPRSQLIQKQREKELQLANSSVANLEKLHAAAERELESYKKEIIKTINGTGSFGADILGEMIEDTRSKLAALAQELEQAKEKAADLKSSAVAVQKEYDEIMSWADLYAGSSIEGKKMILRQLIERVNIGKNFEIEVEFKISVTQFFDFLYPEGDKSVYYRAS

SEQ ID NO: 513 - protein, 681 aa, synthetic construct
MSLNHSSSNTPKIYSYSRVSTLEQMKGSGVAIQINDEVLKSLSNEHSLPIAQETYQDLGKSAYKGEHLQNELGLFLSAVKSRTVAEGSILVVYSLDRLSRLEIGHAKQTYYDLTNNGVSVYALVDNHLYRAHNAADDIIATITFERAHNESKNKSRRVIDAAKQALKRWKETGESQKNLGRTPFWIDQSTNSFNVNAEGVKKAIEMRIAGYGDLKIKQYLDENFEYKPTRLKGRVKLINSWDYIAISQLWGKRSLFGEKTYTIEGIEHVMDNYYPALISEDTFRKLQIQKKTKQGRDTASGKIPLLKSLARCGFCGGAMVFVDKGGNRVNYQCNLAMKGEHPREVYNVNMLDLLTLEVCKDAYLSESSKSNDTFVAEQILKLESELLEQQESRDNLLDYYKTTPSKSLLDLIVDSESKIVELEAKLDAINIKTIEFNTDELSNLPEIFTDSIRTDFLNPERYEIRNNLRRFISSITLSRSEEPCRDAKTKVANCVDITWHFKNGQKRRLSMLPYQFIKSDGGDKTLYLPFVYLYGTKSKIKVEDGDEFLSGILEKLHALDLTRTLYPSKGRYQWSKLSLECGKTYWAPLDNAEFGELGTSFTEFSLSVEDDFLQEHAQRTDYLSLMFNYPSSRGERYDYPETTFLELANKFNFEEERDFSSTLQDNSFNHELYSSLDFLKS

SEQ ID NO: 514 - protein, 546 aa, synthetic construct
MGECMKHQKVSNLFNVAIYIRLSREDGDKEESDSVGNQRKLLTEYVAKKEDFILYDIYVDDGYSGTNFNRPSFQKMIADIEDGKVNCVVVKDLSRFGRDYIDTGRYLERYFPELGVRFISVTDSIDSMKQAYDMLLPIKNIFNEQYARDISKKIQATVKSKQKAGEFIGAFTSYGYKKSPVDKNKLVIDDYAADVVRRIFSLYIQGYGKQRIAKLLNSEGILCPAEYKKVNGENYKNCNRLESTTYWSYSTINSILHREMYVGNMVQGTKHQRMRSKQKKMPKEEWIIVENTHEPIIDKETWEKAQSLLQKRTRELDLETNKNIFAGFVKCGDCGRAMTKNMWRRADGSKTYSLYCGTYKRNGKQYCTPHTLPMAVLKDIVLGDLKAIVDSVDNLKELVQSQSFTASKVKRIADTELSKIKAELERVKRLKKSIYEDYREELISKEEFLSYREDYLKKEELYSKQIEALEEKKKDNVTEDVFETPWLKRLLELKDIETLDRDIVVEMISEIKVYENRKIKITYNFGNELEHLFSSVYSVESEEKAI

SEQ ID NO: 515 - protein, 465 aa, synthetic construct
MKGNAGDTIVKKIDLSPELVRVALYIRVSGEEQKIKGLSLEAQQERLEAYARERGWVIVGIYIDAAKTARKNIHKRTDFQRMMDSVKRDEVDILLFCRLDRWFRSVADYYKIMEVLEAHNCDWKTTDEEYDTTTANGRLYINVKLSIAQNEADIDGERIDVVFDSKIAHGTVVSGSAPFGFRVNEGKRLEVVPEDAAIVQDAFNYFETSISQRATVRYIRETYGVNWCDATFRRMLKEKLYTGVYDRGGRFNDHFCPAIISKQQFDRVQALLERNARSVPSGKVYIFTSILTCAECGHKLVGYKSSDYYYYRCNQHFQRGRCSHNHSAREDVVEKWLFEHLAEELERCQLEWEVAAAKKKASVARTDKAALKRKLTKLKELYVNDLIDIEDYKRDYQIYTAALKQIPEPSIEPPPDFAAVRRLLDNDFKTIYENLTREEKRTLWRSVIKEIRIDNDQNITGVVFG

SEQ ID NO: 516 - protein, 559 aa, synthetic construct
MKVAIYTRVSTDKKEQKLSFQSQSEYYTQYCLEKGYDLYHIYADEGITGTKKDRKEFINMMLEAGLDVERNKSNKIISFEKSNREPKFNYILMKDITRFSRNLNIIDTVRALRDKKVYLIFEDMNITTEDDKWEFQFGLYMTFSQQESLDKSSKLKWAYERRKEQGKWHMSNPLFGYEYNKDKGIYEVNEEEAVWVKKAFDLYVNELEGTKNVATYLNNNNVKTRRGKEWRADGIKRMLTNEKYIGKVAIGKLQNAAVTSETKTQKKIDKENWKIIENGIAAIIDEKTFNKAQEILSSRVAKMADGSKVGSKKVKSIFHKKIKCSKCGSFFTRVKGYKVKEGKTIPEYNYFCINRRTLKSCDMRGVSHNVLIRELQRLIDSGIIRSLILKTSGAGNEGLEINLFEKILEDINKQRSEIDTNTVEIQKQIDDVTKKIDLLYENFFNDDTTDLMKQMTTKKLEQLAEEQNKLELKKLECSTAAIDEKERYIKEYYSSMQQLSKKKKFTVEELIEWIDRIEVHENRVLHFYFKFPSMYKIQFGDGLTPEESDLVYTRFDVKY

SEQ ID NO: 517 - protein, 480 aa, synthetic construct
MQDLLPTAIYVRVSSEMQAGEDRYSIPEQIDRLHKYCDAQGWTIAKEYVDPGHSGSNLKRPAIQELISDAKNGFIRRVVVFKLDRLSRSQRDTMYLIEDVFKAHDVAFVSLSEMFDTSTPFGMAMIGILSVFAQLERENIKDRMSMGRLGRAKRGLWRGGSNTPVGYDFMDGQLVINEYEALQVREIFRLFIDEQLSFHAVSREMQSRFTNKYSTYNDSGSISTILRNRLYIGKIKYGTQEFDGQHQPIIDRETFERAQARIEEISRNTGEHWKNPYHGKHLLSGLIWCGNCGARYFCVTTKRKNGPQYRYYQCYTRNGSSDMRKADFCKNPNWRVEKLNAAVMEEIRRLCTDEKYFNRIARDGKKENNNAGKEKALQRELSSIEKQISRLVELYQMGVSVQDIATRIHDAQERKNKLTQELLSLNQQSPKNRRQEALTYIHELKWCLDADDVAAQRRLLDALVNKIVITEGGFEVDWKF

SEQ ID NO: 518 - protein, 549 aa, synthetic construct
MKEPKVAIYIRLSLADEDTRRSKEESDSVQHQRLLIYEFLNRHPELKDAPRTEFVDDGFTGTNTNRPAFQNMMKKLRSGELNVLVTKDFSRAMRDYTEMGNYLECVFPFLGVRYISINDGYDSNDYKGVTSGMDVVIRNIVYASYSKDLSVKTTTAKLQMMKQGKYVGSIAPYGYQFHPTIRNKLAIDPESASVVRRIFDLALAGKKTRQIAEILNIDGILTPGSYFRLKHPGQNRFQKRKESNGWNYHTVLGILHQYEYTGATVGHKRSKAAVNVKKALPNKKEDWIVVENMHEAIVTHEEFQKVQEILKLGRKRGSHGIQEYPLKGVVRCAECHRIMTRRTGRKGAVYYLCDKSASDPGASCPRGKHFMETDIEQVVLHAIQQMLTLYRQKENQKTALQFTRTGRINACMAELTRLQQLQERYRQEKLTLYEGYIAGDCSKERYLKKKAEVDKTVQELDEDVKKQESALAALEEEAHTSENPLLELSRQYRDTPSLTKEMVRGFIQDIYIYPDSQIEIVWKFRDCFADLTDNQTEETEDNYGTDIQR

SEQ ID NO: 519 - protein, 500 aa, synthetic construct
MTLARRSAAAKARIITGAVIYARVSKDDAGGRSCREQINGCTEDCKYEEWQVLHVLEDNDRGASRHSKRERPDFQRLPTVLKPGQVLVVWEPSRITRDPVEFGPFCDVLAERDVPLYYDGRLYDMNDDDDRARVWQDILDGAKQAGKTRKRVIRALSANQDARLPHGKKSPGLRIVRDDRTGKPVRREIDPVQARILNEAARLILDENKTPRAVGRLFEDQWRASGGGAFRGPDVKRILTNPTLFGIYAHYGEELGEGQWPAVLDRELYPLLRRRLCSEVVVETRGTEPKYLLTSIARCNSCLELGKQGKIDHKGPTNKQRHGDRYICAEYNHVARNMVRVDAHVEEVLLSLLERPSTRTKLLAQDESETESIESELSAIKNLREEINAYVKNAARTRMSAESVAVYVEELEADIRAANARVDAMTQAADPVLIEAAREDIRELWASDRFTLQRKREIIRRGFDVRIVPVERRGRYSEVGVQVYPARSLAPQQNRAVGSV

SEQ ID NO: 520 - protein, 492 aa, synthetic construct
MSPRPVARLNRRRAVLYLRQSTYREESISLELQEAAGRDYCARQGYDVIAVEADPGISGRTWQRPAVQRVMGMIDDGSADVVVLWRWSRLSRSRKDWALAADRADLAGGSIESATEPNDATAAGRFARGVMTELAAFESERIGEQWKETHDRRRRLGLPSDGADRFGYEKRDGWYHPHPVQAPLLAEMYRRYLRGEGFTRIVKWLNESGHTTRRGGTWSRVTLTHLLDAGFGAGKIIQRPTTKDRRDWRISEATFHPGAQTPVITPAEWDEYVALRLDAPKPATVVEPKYALTGLIVCGDCGAPMHVGNQGLKDYKCSRAAQVRDVSGMYMTRALVEQRVREWVEEIAADVDGEMERRAKQRERRVVQLDNAGTVDRKIADLTDRMGRITVRWSSGDLPDAAYTSSIALLDADLAALRERRRRAAPIPRIEINPQRVAADLAGDWEALTVIERRNLLRALIHQVRIVKPTRPGTGVWRERVQIIPSWAAPIG

SEQ ID NO: 521 - protein, 584 aa, synthetic construct
MAYASARSRSSLGYFPRLFCSRYLDISARSCTSSLLPGIARSSSLGEGAALIRRRVACNRSWLGKRRGPRSGYPEVESGGEENEANRKKVAALLADVRRGDMVIVTDIDRFGRDVVFIVKNVRQIMRKGAVFVAIDKGFDSRSPMAEDTLANWAVGAEQERRRIKERTEGGRKHLRVQGYFVEGQPPFGYERQPKPKGTKTPLPLRVVPEHAAVVRRMFALALEGSSVFEIAKRLRQEFGKVKAFGRAWVLIALRNRVYTGRIAKTAVRPKATRGAVQLPAEWVPAHEAIVDDETFNNVQLALRDRRRGRKAQTESATANHLLRGICRCAECGGSVAAIPVPRSSRHKVGYYVCRGHVEQKEKGVRCKSSAWLRQPDADAAAGEQFLAFARSLLTSLTRPPRQIEKPDFAAQRREIKIARQRVVEFVAKGLFTVEDVKVELNRLDDSLAAIEAKEAEFKETAGNDTIETRKHAHAYVQQIVDEWSILHVDIQRALIRVFTSKVEATKDKQIRITWRDPSQISAAHGAQKLPALRPAPAVAALPAPSPVALPSPIVAALPAPSISAREYLGTMACPPASVERSQS

SEQ ID NO: 522 - protein, 498 aa, synthetic construct
MDATTAPTRRAALYLRISRDLTGEGLAVERQRELCQQIVSLRGWTVVDEFVDNSISASDARKNRPGYDALVAAYDAGSFDALVCYDMDRLTRQPRQMEDWLDAAEKNGLALVTANGEADLTTDAGRTFVRVRMAFARGEVERKSARQKAAAVQRANLGRPPLGTRLTGYTSRGEVVPDEAELVRRIFKLFHAGESLRGIARTLTNEGTSARSGKPWNPTSVYGILANPRYCGRSIYNRLATETDARKARRNGEVTEALTVTRGTWEALVSEDVFDAVQAILTDPRRITNRQGTERKHLGSGLFLCATCDQPVVSFSGGRYRCKAACVNRAHGPVDYDRIRQIITADDDQDAPRARGVDEFVTAVVAERLRRPDARKRLAPPKANTAPLRAEQDALRARLAKVDADYDDDLIDARRWRTKKEKIGAQLAEVDRKIKAVQPGGGALDDVLAAPHPSEAFMAASLMARRSVIDALCEVRLRRGTRGSKTFDPNTIRIDWRR

SEQ ID NO: 523 - protein, 562 aa, synthetic construct
MNMQSPHVALRAALYLRVSTTRQAEHDVSIPDQRKQGEAYCASRGYQLVETFVEAGASATNDRRPEFQRMIEAGTSKPAPFDVVVVHSFSRFFRDHFELEFNVRKLAKNGVKLVSITQEMGDDPMHVMMRQIMALFDEYQSKENGKHVMRALKENARQGFWNGSLPPIGYRVVDAEQRGAKMKKKLEIDPLHADTVRLIFRLASEGDGTSGPMGVKNIVNYLNKHNLFTRNGGRWGIGQLHRVLTRRTYIGEHRFNRRSNKGVVKPEEEIVTVPVPPLIDLEIFEAVQNRLKVNNPKVTPPRVVSGPNLLTGICHCGNCGGAMTLRTGKNGRYRYYACSIRARQGETGCKGRAIPMDKLDRMVVTHIEERLLDPERIEDVLASLLDRRQEGVERRGQHIAELNHRAAEADNRLKRLYDAIEAGSLDPAESSLGERIAGLTALRDQARADATRIEAMLASSTHQRLTGAAVRELASEARTRLRLGKGGYRREHVRAFAQHVEVADDAIYIKGSKNVLLRTLVATKGGKTAGIGVPGFIPKWRTVRTTGWFMGGIYLSNNNILR

SEQ ID NO: 524 - protein, 713 aa, synthetic construct
MAGIKEEKKIYLVGIYCRLSKDDGTDNESASIATQKSILTDYVKKQGWHIAKTYVDDGYSGTNFQRPSFQNMIKDIESGLINCVITKDLSRLGRNYLDCGLYLEVFFPEHNVRYIAVNDGVDTLNKSAMDITPFRNILNEMYAADISVKIKSAYRARFQQGKFMGTTAPYGYIKDPADHNHLLIDDKVAHVVKEIFDLALKGNGVAKICIHLNKQHILRPAAYAAERGETGFERHFEGNEDKRYIWSGNSVRSILRSPIYAGNLVGYKRIAANMKSKKRPSKLPEEWEVIPNTHEGIVTQEEFDIVQQLITSRRLPQNKGGFVNIFAGVIKCVDCGCALRAMNVHRRKRPEIIDCVQYSCNNYARNGRSECSAHNIEARDLFNAVLADINCFADMAVNDEKAVRAIEKRLTETDQSRAKALEKERKKLNKRLAELDRLFSSLYEDKVMERITERNFEMMSGKYQKEQLEIEARLKEVTETLNESYEKSRGIRDFLALIRNYQGLKELDATVINALIDKILVSEREKMADGTVKQEIKIYYKFIGFVDELHIIPTKRWAAMPAKNCTVCGVEYVPGSGASRYCPACAKKIRREKSNESKRRSREQKKDSMYELSAKNDRLIWNGGRDREEELLANCYFNSMNLAMDNGIRSIAFPSISTGVYSFPVELAAKIAVHTVNRFLQDNPDSFDLVEWVLFDTHTESVYEAEVDKLYDK

SEQ ID NO: 525 - protein, 474 aa, synthetic construct
MNAIYARVSTDAQAETGYSISDQIRTCREHAEKNGLEIVEYIDDGYSGEYLERPALERLRDDLRAKLIHNVIVYDPDRLSRNLTNQLLLADEIEKASAQLIFITHDYDASPEGRLFFSIRGAISAFEKAKIRERTLRGKRSKALSGKLTFNDDAYGYTYDKENSMCIINPEEAEIVKLIFQLYTTRNYGVNSLYVELKSMGVVNRKGKPFGLATIDYMLANETYAGTKWSFKQYLKNVGPKKRERSIRDKSEWIPITVPAIIDRETWERAVECRRINKVVAKRNSKHDYLLSSIIRCAGCGYAMRGVNYHRGNKDYRYYVCTAYINGHECDYRKTISSKDLDDAVWAELTEVAKSKHGLSIYQNNTTDTTAVKIDLEKQLTKLKKRQSAIVKWVADGILETEVAEKDLQSISKEVAATKNALSALIIIPSVKSIRSKDILKATSFEEKRRLLIAYGIKVFAKRKNGSIVYTIKV

SEQ ID NO: 526 - protein, 534 aa, synthetic construct
MSDQKMIIGYYRLSMEDDSEGESNSIMNQRKLIKDYIAGIPELSAMPFQEYYDDGYSGSSMERPAIKQVLQLARENQVQCIVVKDFSRFARNYIEMGTYLEQIFPFLGVRFISISDHYDSIDYRGKSSDIEVQFKGLIADFYVKDQSVKVKAAVGTKRKNGEYCCGSAPYGYRINPENKKSLLIVEEEAKVIRRVFELTNQRYSKKDICRLFNEEGILTPLQSMSRRQKSDSKRASSRGLQWTSDMVRKILNDKNYIGCMVYGKTKIPEPGTGKEVPVPRCQWKIMENHHEPIVSEETFEKAQSLQVRHVRKSKFDKDITLLSGYVKCGNCRRNLTGSKKLHGHILYSCAYSQGKEDTGCFAGKADDKMLEQIVLAEIKAYLRQNISQEQMQQSMREQHEDNIQEYKLESQECENRQEEIRIQNRRNYEKYHEGQMDQKQFMEAKKQLEEEKERLQRRGQELDELINGEKEILMKKNVPVEQMLKFLGYEKLKQEMLEEYVQGIYVYDDGRVEVEWKELSKKAVRNRIEVKKDF

SEQ ID NO: 527 - protein, 529 aa, synthetic construct
MPYCLYLRKSRADIDAEANGEMETLARHEKILLDLAKRMHLDVTEIYREVVSGETISSRPVVQHLLTEVENEMWDGVLVVEIERLARGDTIDQGIVSRAFKFSNTKIITPLKTYDPNNEYDEEYFEFGLFMSRREYKTIRRRLTQGRMSSAKEGKHTGSKAPYGYDRIHVESGKGYTLSPNEKETPIVKMIFDWFVNGQLQEDGSYRKLGAHAIAHRLTNLSIDSPTGNPTWNPRSVYWILHNPVYTGKIRWGYKKDKKIIVDGAVKRTRIIPPEEEQILVEGLHPAIISDEIFNQAQELFLRRGNPSVVIEKELKNPLAGVVVCGICGRPLRYRSNANRRDFGVECRTYGCPCKGSYIYIVEKRIIDALRDWVNEYKLSWDDMPREMHSLLIVKEQAYNAAIKELNTLTKQLDKTHDLLEQGIYDTETFLIRSKSLSEKIAESEKNIAKLSADINNEKLRENNRKNLIPKVENLIDIYWQLPNASAKNDMLKEVLEKVEYTKLHTVGRSKTKKLDDFDLVLYPKLPRT

SEQ ID NO: 528 - protein, 517 aa, synthetic construct
MSVSEMPTKAAVYVRLSKEDRNKVNKDDDSESIINQQTMLLDYCRQHGWEVYDVYNDEDFSGSDRERPDFNRMIADARDHRFDTILCKTQSRFARDMEIIEKYINGLFPIWGIRFISVIDNHDSDNKSNKKARQINSLIDQWYLEDLSENVRATLAAKRKQGLWVGAFAPFGYIKDPENRNRLIVDEEAAAIVKYVFSLYLQGFGITAVARRLNEEKIPNPATYKQQHGQPFQNINGQCSAIWHAYTVQRMLSNQVYIGNTVQGTCENISYKSSKKRRKPREEWDIVAHTHEPIIDADTFEQVQRLRKSKPKCSRTGKPNLFAAKVRCLKCGGSMRVYYTHRQRFFRCATAYFAKHRCEGTFVSENVLQREVLRQIRSLFAAYVDDESVAKAACLHRSPTAEQAFLQQRLHRLEQDIAKIDARLKAVYLDKLDGVITAQDYPDIKREFQTEREALVRAKNRLSEEMAAAAKETAPSDSIEKWKNLQEPDYLTVSTLIDYLEVGGDKNNRIIHIHWNI

SEQ ID NO: 529 - protein, 522 aa, synthetic construct
MDNRKVLYPYIRFSKDEQKHGTSYERQMDKIEKYAAENDFVIDDTLNLKDLGLSAFKGKHKDKGALGGFIKAIEKKSIPVDGSSYLCIEQFDRLSREDVDTAYQLFRSILKANVNIITLMDKRIYTKESLNDMMSIIYSIMLMSQANVESQKKSERITASYRTKLDKVKSGENILFAARYPEWVDNQGSIKDRQFVLNDKAEIVRRIFQLYLDGASMNGIARIFNDEGIASFMRTKNSINQWSSGNVSSILRNRCVVGDLCVSRTGDIIKGYYPPVISVDDFEATEGLRDKKRTLKTAGKPSINVFTGKVFCVECGRKFYFEKESFTYKGQKNIYHFLKCSGKRNNGGCHSLNIKYEDFLDATKAPLKMKMKKDPKKVGEIEDHISKIRGVVKELNGELAQLDLMLDSGEINATIYAKAASKLEDKLVVERKRIASYKQKIAQMNNDLDFDSFDIHDPKSINKVKKYINDNYAAFIVSSYNKTILSLSHTGGVIITPFKHKKSLVKDSESVKDFGHDSNRLI

SEQ ID NO: 530 - protein, 393 aa, synthetic construct
MEEGKRVSPSVPYGYFRNPKNKQELLVDKESAKVVKRIYHLVIEGYGVTQIADILTKDKVLIPSAYAEIHYPKNNHSSKKRGIEDPYFWTPTTVGYILEKREYMGHTILGKTICLDYKTKKRRKAKEDELIIFKNTHEAIIDEETWNNAQRLRKMVRRSPKYGTTSHPFTGLLICADCGGKLSYREPAEHKEKKYDCDYSFVCQHYRHRKGTCSMHYIKVKTVNEILLKSIREITDFAKEDKQEFLKVMNKLSDEKREEKYQEDKEKLEKLSSRNEELTTLITKLYEDHALGKIPVKHFDRLFNTYDTEQQDLEKQIQYFKQEIESYYQRKVDTDKFLKMIEKYTDIEKLTVPMINEYIEKVVVHEAMGGRQGKDRKQQVDVYFNFIGNCQVP

SEQ ID NO: 531 - protein, 542 aa, synthetic construct
MKLAIMNNIDYKVGIYIRLSREDEEKEKYQESESIGNQRTLLMQYIKENKLNFISEYVDDGVSGTSFDRPAFNKMIADIEAGKINMVVTKDLSRLGRNYVQSGLYIETYFPEHEVRFVAILDNIDTAYDTSNNDIAPFKSILNEMYAKDTSKKINSVLQSKRNLGEYLGTAPYGYKKDPENKYHLIIDEEAANVVKLIYEKYLAGFGTMQIADYLSKKKIPIPSDYNKRKRGTKSLTYGLWQQSTVRFILSNEIYTGTVIQGKRKKVSFKSKKFIDLPEEDWIKVENMHEAIISKEDFERAKKVIKATKGSRVVQNDYLFKELLRCYDCKGYIGIRSPDKNGNIYGRCQRYGRFGKFDVCSPHNFNYQVFEEQMLEVLREVCKEYTNTKKLEEIAKQTKTKQSKEIDIKKQIESFKQQVESETRKLEVMYDDRLAGIITLEEYMKNANRIKEVVKGYEQNIKEFEQELLGESDKTKNDNRLDNLIEEFLNMEKPSKEIIREFIEKIEIHSDKQVDIYFNFKPLQDLNNNFICARKEYEKKVG

SEQ ID NO: 532 - protein, 571 aa, synthetic construct
MIHLAIPYRRFSSDKQTGNTSLTRQQDLVTKWLSKNPEYKTLPQYDYVDEAVSGYHGDNIKFGQLGEFISEVEKGTFNRYKAPTLLIENFDRFGRLKPRKALGYITDILEAGVSICLLDRGEVITPDKVDDDFFLMQLVMTASRAHGESKRKSDNVTKAWQIKAEGIADGATLTRNVPFWINPDDRQLVIPERAKLVERIFKMRLESMSCYAIGKTLNQEGIPVYTHRTVTPGKDYKKRRVAPCWHSANVSGLLSNKAVLGILPAQQVNKHNKHRQDTLRADTPGYYPAVISATLFAAVQSLKDEKHGKKRVLSNINSIQIFKKMLRCVCGAYMDVAGCRSTYSGVFKCASARAGSTLCTKPSINRQKVEKALLTRLLPSLTRLDVNHELSNQIETLKAEIEGLDILIRKGWEDYENSDHPFYLSDGQASRISQNEKKREEKRSELAALSVTEQSSVYENISHLDLSDYTQRCEARVIIKRMISSITIDTDKGLLDVHLVNGNIITGFCIDSTSNKKDVFTEATDEEKQAELTAIIGERLPLVIPAGDPVGVAYEPMLDWPDVDTGDYPNE

SEQ ID NO: 533 - protein, 624 aa, synthetic construct
MSSGTEAIDRKQRIRDRYRGVDTSELEVIPAKIVEGLGESTSIRRVAAYVRVSTDNDEQTSSYELQKNYYTDYIKAQPGWEFVGIYDDEGISGTSLAHRKGMQQLIEDCKAGKIDLILTKSIARFARNIVDCLSVIETLKNLDPPVGVKFEADNIYTLDSNGRMILTILASVAEEESHSKSIIMNWSIDRRFSRGLFLTPALLGYDQDEDGNLMVNQDESQTVKVIYYLYLNGFSLKDIAELLTDYERKTKLGNTEWNPGTIAGIIANERHCGDVLARKTFTPNFLTHKAKKNNNDRTQYRQRDHHEAIVSRDVFNAANHLRASRTYKRKNHPLPVLSVVDDGILRGYVPFDKDWTGFSAEEYREASESVMREKQSNTVEVRNRLDLTGYEVVRAQYFATLQNPAMTISNGRLRFNAACLKKFDDVEYVELLLNSVDRCIAIRPCEKSNPNAIRWGRLKEGRWCANTLGCRGLAKALFDIMEWDEDLKYRFRGQLVEQGGDKLMLFELDQPEMIKVEEIVLPPKEEESEGETVKKTIYIFPPEWAGTFGQPITSVAQIGILQQEHYAGNWDVLRPASEIKEMNIFTADGLNTLLHEAEEIMEGWIDIDGGKQNVNAAEGAGIGD

SEQ ID NO: 534 - protein, 550 aa, synthetic construct
MPSPLRALILVRLSRVTDATTSPERQEDACREFCTRQGMTVVGVAEDLDVSGSTDPLDRDGSGPWLRDRLSEFDVVVAAKLDRYGRSTRHVYGLFDYLNGHGKRLLSADGVINTLGPAGELILFILSWAAQMELDAIKGRNRDSAQYSLNNGKYRGGIVPAGFRKAKHPDKGWTLVHDVGCDRPGKDGHDECSGTRCRNAMAPVIQEIVRRILDGESQSSIVKDLNGREVMTARDRQAELNDRPTVGHEWSVSNLGRIIASPTLIGQGTRTDENGREVPLIHNGEIVQRGEPLISASDYRALRAKLDERAPATRKIAEPSLLLGVLECECGKPMWMLRGGKRVRADGTRRSAVDRYRCASHTQGDRKSCGHPSFKAPDAEALAHALITDALGSAPDGTARPLIVREWVEGTSNGDVLADLNAQIEGIADDLPYLRGEQRQAARDMLDRLYARQDELEGQEDTPSGWVFRESDQSLRDYWEALDTPGRNALLREYGVEMTFGKSGVEVRLTNLPKAFGAVFENVARAATFEPDALRAFLAENYGRTEVTSA

SEQ ID NO: 535 - protein, 474 aa, synthetic construct
MAAIIYSRISSLRQTVGHGIGRQESMALAYCERIGLAVADNVSDVCSGFHAKQMGGALGMLVKAIEDGSLTSSDCLVVESLDRLGRENTYDALERFMKIVRSGVDVHEVSTGIVYSKASPHLLHIAFAVMERAHNESLMKSQRAKANHARRREQARTEFVTTVTPGWIDVVNDVPVLNEYHKTVQLIFKMYLNGQSFKSIAMDLNNQEIELIPRRSGKGSRLSGWTDSSIRQILVSKAVCGYYPTDHEIIPDYYPACISEMDFQRVEDIRTRKAVSKQKSGIITFLSGICKCSCGLNMISYTTHWQTKNEKKTRRGLRCSARGLNSCSLAVVDTTTIEELFLKHLPDNTKLSSMFKVYYRKADALRARARALRKQQDNLIELVEAGSSSAKERFFELQQECSNLESEAQHFEDYKIGNIKIDSLTPDGIRKTNVGLAAAGVVCELHENHMVIKVKGDEVARTAYPDFTRTPKKD

SEQ ID NO: 536 - protein, 470 aa, synthetic construct
MEARPLSAAIYLRVSTEGQAATDKYGLELQEDACRSYAKRAGFEVKQVYQDVITGTTSKRAAFSRLLADLPAYHAVIIFSVDRLARTVPIAYGLAQEIADTGAELHSSTEGKLSFNDDGQATAFGLHALLADSERRRIVRRLTEGKKQKVRNGQPLAPLRCYGYQNGEVFEEQAQWVRWMYQQALVTGTHEIMNELQRLGVPSSAGHPKWNRDQVLKILRNSVYRGEYLYGRDRRTRRAHPDAISCPCPRIVDDETWYAVQRAIDYRRSGAGRRGSRTDLFSLTGRIRCAECGAAMVGRRPGGPDTRNAGYVYYACGDPALMRHRKGCTHRKFYPAVDVHGAVQAELERLARQPAQLASMVVTPTSRPIDTDKAVHDIDAQLTKARNAYLRGIDTEDEYAETKATLLAQRARLLALAEGGQPEPVADAGHLQRALAEALELGDLHQAAGRLGLLVRVAPGGEITLALDPS

SEQ ID NO: 537 - protein, 518 aa, synthetic construct; identical to SEQ ID NO: 70

SEQ ID NO: 538 - protein, 595 aa, synthetic construct
MSVYSDSKVSHQAQRESGHRWCQANGAEVLDEFEDLGVSAIKVSTFERPDLGAWLTPERSHEWDTIVWAKVDRAWRSMRDGLAFMHWAEDNRKRVVFADDGLELDYRNGRKKGDMQAVITDMFMLLLSMFAQIEGERFVQRSLSAHGELKTTDRWQAGTPPFGYLTVDRPSGKGKGLAKNPDQQEILHEMARLFLEGWSYNRLAIWLNDNQIKTNHNLSVTAKAQKTGKSPKKPLSDRPWQDGTVKKILTSPATQGFKVINMQPDPEKRKHGIDPDYQIASDPVTGEPIRMADPTFDPETWAKIQDKAAERTAKPRDKTKWSNPMLGVVYCNCGAAFTRISKEDRNYFYFRCGRERGQACKDRTVRGDFLESTIREFFLQGHLAHRRVTQRKFVPGNDRSEEFEQIQTSIRNMRRNYEKGYYKGEEDEYEAKMDGLVAKRDRIESEGVVIRGGYVTEDTGRTWGDLFSESEDWSVIQEAVKDAGIRLMVEGTYPLIVRVDDPNERDGIPYFSVEMKRAPDLRSNQYRIWAAIQKDPEANDTVIGSRLGVHPVTVGRWRKRMPADGIDPKPEPQYWIEPFGGTPDPGESHPGDAAA

SEQ ID NO: 539 - protein, 543 aa, synthetic construct
MKNTRRAVLYLRVSTQEQATEGYSIPAQRQNGIEQAKRMGYEVVSVYADEGESGKSTKKRLAYQRMMQDAKNHKFDLVIIWKHTRLGRNMLDILHTVDELLQHDIGLYSISEQFDITTSSGKLMLQLLGSFGEFERNQISENVQMAMKSLVRDQKRYAGGRRLGYISGTDEQGSKQLIVEKDEAKIVQLIYAKYMGGEGYRSIANFLNRQGYKTLKGNAFSTTAIKDILKNKIYAGYIEYARYLNWDTKRRKGKNPTPILVDGNHEPIIDRTTYGRVQERLLQEGKKPIWNHSGENLLTGLLRCPECSAPMAASNVTNTLKGGIKKRIRYYSCSAFRNKGASICHANSIRADKAESFVVARLKEVVQVPKILEQIVRELNEELIAQAKPLEQELAVVVIERGEIDSKLFKWREALLDSPELIETLHEHVADLKDKHRNLQLRENEILGILEHRGEKIRVTDVKRILKSVDILLKGREKQVVKQIYRAFIKKITFDKETKMNIQLTIRFDEDIVRQLNEMYQETVSDSQDAVLLVCRRGFELLL

SEQ ID NO: 540 - protein, 530 aa, synthetic construct
MMYQMGVYCRLSKDDGENKVSESIENQMKLIREYVTKSEDLEIADIYIDDGYSGLYFANRPEFQRMMEDIYKGKIQGVITKDISRLGREHIETSNYIERVFPSLGVRYIAILDGVDSVHHSNEELAQFKTLFNDMYSRDISKKIRGALTAQKKRGQFMSGFAPYGYVKDPADKHHFLVDEEAAKVVRRIFYMSLEGYSRDGIAKKLNQEGILTPSEYKRKVQGLKYANALEKAGAKGWAYPTINVILRNRVYTGAMVQHKSEKISYKVEKYQYIPEEQQYIVEGMHEAIISKDTFEQVQKLMKKRTRTPGFNSEVRKVNPYAGIIVCGDCGYNFQRVTCRDGYECGTYHKKGNTVCYSHFIKKEVLDSIVKNEIQRQAELALKESDKDEILKAADRKKEVQRRCAEANQKIERLQKELVAVQKYKKKTYENYVDGVLDKEEYLSYKAEYEKQDKEIRAKIQLAEQEKDSFGEAEESYENWIEKFIKYGTLSEVTREIVTELIEKIVVNGDKSIDIVFKYQSPYSKEKNAV

SEQ ID NO: 541 - protein, 554 aa, synthetic construct
MNNRYSGGGKEMIADILQRVSTKKQSTDEKTGLKRQDENINNWLNQNPECTVRNEIVLKGQSAFSGKHVSNTLRLITAKHGDSVDINAKSISEFDKYLLEVYYGNMPAPDFLIVDEFSRLSRLKPSESNDLIRWFARMGISIVIAQEDKVYAPEAHDQFEDVMILHLRIKLAYEESKKKSQLIRTAKKHNLLKAMKEGGILKFGNMPKWLEVQNDQYVLVPHRAEAIRFMFDCVVSGMSKGATARELNKKGFKGWDRNGNDTENKWDATKIARIIDSKSVTGTHVSRTWKSDTERSSSYMGKAQSMEQGLEIPNAYPRIISDEVFHNAQLKRGSAITKQKKNCKTHNDGTCIIRNAVCSLCGSSMLYKHASRGEQYSEFLCSKRKYGGSCSNSSINYQKAEKAVLTLLFEHVNLSLLFEQDDSRDLLRAQQQAVQDEIDVLNARIKEKKHKHQKVSIEVALLLDDKETELEDIKQQLRAKQGEDFSDVIRTWEEIEKGEPQQRVKCSTLIEVVTSKIEIESIARGKKVVRVFGEFGCIFAMIEGGEINYFKGNW

SEQ ID NO: 542 - protein, 627 aa, synthetic construct
MLTFSSRPQIYSYQRFSNVEQAKGTSLDRQKELIEEVAKRYDLDLNHNFVMTDKGLSAYHGDHKKKGELGLFIKAVDTGMIAPGSVLIVESLDRLSREDVMTALGCFSELLKADITIITAMDEKTYTKDSLKDTGEILMSVLIMARANEESKAKEKRSVGFINKQLQNFYDGKKADVAGAIPFWISRIQSEDPKIKKGFYINDKREVIDLIIDLYFVKNKGLRSISKELLKRNISTPKGGEVWGVSTISSILNNEALFGRKRFILREKSKEKEEEIVLDDYFPAVMSKDDFESMQAIKKRKSGAGKGDKSKRGGLVYLLTDYGKKAVCAKCGRGIGSQPQRQKGHIRRRLHCYTHKEKGTCCKSIIQDYIEDAFLMSVARHIDYNLINKTVDPNQAILVSEKLEDIESQMDNIQELYIITKEKKRKASLLKRLEDLTQEKEHLKNKESSINQYSVSKEDINNFVQKVNDARNYENNEARLFIKDILLKSIKLLTVHMEKKKLEDFGYPNLFENSIVNVIDVEFYSGKTISIFVCCETNKTLFTRVSNDMTNLPFGSFRQQDLEYWNDNGGGELESLLRLTHNENQDSQEKYDELSIVDKAWLTSDFSESLLESMFDVLDSASAPQRK

SEQ ID NO: 543 - protein, 579 aa, synthetic construct
MTRSKAKTQVEPAWLADINAALAVAVADVDPAQWVYGYVRISRDEKDRAEGMHLQAKNQVKLAKRKNLPLARIWCDNDMSGADLDRPALREVLGLVTGGPAKVVLTRDVARLTRDYDLGNELMKLGRDEGVRYCFVNATDYDLTTGAGRKNFMVAVAEAVEYREVNTENLLERMSEEAAKGVMQGGSRRFGYGKVAGTHPITGAEILDRCALRDEEVEVLREGRDRLINGETQTAIVTDWNARGVTTAEGELWGVGRLAKQLLLEAYVAYDQGEHTDANGDRCECLNNPEGNGIRFHERSGTRHRGQWPAIFTRAEHDAMRAAVTAHRRSKNPERPRQRNAFYWLTGLAECGGTWREGTDRAGQYCGGWLVGSALERTRKSGPPVIQRRYGCRSKDARKVVCACGRVFRDADALETFVAQAVIAEYENPEILARLDRGNDNAEQIAALQKRIETTAGNLDAEADRRTEVLSGVGDEFDLRVIDRTITGLKASLKILRAEQDSLRSSQALAVLADIGSTPGELRKAWATKGSRWRHEAAARVIEKVIVRPANIYAARWEDQNGRVWRFDPSSVEILWRQL

SEQ ID NO: 544 - protein, 533 aa, synthetic construct
MHDTTTTKPKAYSYLRFSTAEQSKGDSHRRQLALAEEYCRQKGLELDRTTTFEDLGVSAFSGKNRRKGALRAFLDAVEEEIIPSGSYLLVESLDRVSREAILDAQATFLQIVNAGITLVTLKGTPKEYSRATVNANPVDLLVSLLEMIRANEESETKSQRIKADWSRKRTRAAAGEAITSQIPAWLQRVGKGFEVIEERAAIVRRIYDLTLQGLGQHAIMAMFNKEGLKPFGRAKWWHRSYVRLVLHNPAVVGTFVPHRMVAGRREPLEPIPNYYPAVITPETFEAVRALDKPVAGPTKMFASMFSGLVKCEECGGPMVRTRKGQAPKPFYHVFVCHNAKLGLGCECRTVRQQTLEDMLRSQMFKFIEDAPTHDEDLTEELNRVEEHISITQEQAAMLVDAIAQRPLPQLVDRLALLDAELVEMRARKVELEAAFRDTARPVVMKRLTDLDDLLDKGEGDIRPRAQVLLRQVLDHIVIHFDREASRRKPRGHLEFVWKSGGRSYLDWGPMFYPVKPTTRSSRRSVDDEEPQQA

SEQ ID NO: 545 - protein, 475 aa, synthetic construct
MKTTNKVAIYVRVSTTSQVEEGYSIDEQKDKLEAYCKIKDWKIYDVYVDGGFSGANTQRPELERLISDVKRKKVDIVLVYKLDRLSRSQKDTLFLIEDVFAKNDVAFISLQENFDTSTPFGKASIGMLSVFAQLEREQIKERMILGKEGRAKNGKSMSWTTIPFGYDYSKETGVLSVNPTQALIVNRIFTEYLNGKPVVKIIRDLNAEGHVGRKRPWGETITKYLLKNETYLGKVKYKDKVYEGQHEPIITQELFDLVQLEVERRQISAYEKYNNPRPFRAKYMLSGLMKCGYCGASLGLRYTRKDKNGISHHKYQCRNRHSKDLEKRCESGWYSKEELERGVIKELERIKFDPKYKNETLAKKEETIKVEEIKKQLERINNQVSKLTELYLDEIITRKELDEKNDKIKTERQFLEEQLENQKSNVLSIRKRKLTRLLKDFDVEKLSYEDASKIVKNIIKEIIVTKDGMSITLDF

SEQ ID NO: 546 - protein, 498 aa, synthetic construct
MIGILARVSTEEQARTGYSIDYQIREGIKKAGTSDIKKYIDDGYSGEFLERPGLTQLRKDVKEGLITKVICLDPDRLARKLMLQLIVTDELEKNGAELVFVSSEYAKTPEGQLFYSMRGAISEFEKAKINERMSSGRREKARKGKVVKNSFTYGYDYDKEKSEYVINEAEARVVQLIFELFTKPNDIAKGMNGIARYLTDNLIPTKRGAEVWHRNVVRQILMKEAYTGRMPQNRWDTEGMLGNKYRAPEDKVPMTVRPKEEWIYVDVPQIIPPEKFEHVQKLLAESRRRHTKESMHQYLLSGLLRCTKCGNTMTGRKSKYWSKYIYEYTDKKNSVGAKEKGCGRKIACAKIDEMVWDTILNWLNNPDEIAAAVEETQVAYMDNEIERVEQDIEKTKAARKRVIKLFSSDLGIGEEEIREELRELSEREEVLSKRLTELQSKQEDEQRFESSRNLMSETLEYYLDLNPDELTFEDKQNIIRMVAKEILVGEDEVQIIPF

SEQ ID NO: 547 - protein, 463 aa, synthetic construct
MRAAVYLRQSQDRSGEALGIDRQREDVRRLVEARGWTVVAEFVDNDVSALSRKPRPQFSAMMTRVDAGEFDVIVARHMDRLLRRLSELESTLERCQRAGVAIVTASDGVDTSTDGGRLVARILSSVAQGEVERKGSRQRSAAAQAAKQGRWVGGRRPFGYEKDGITICEPEAAMIKQAYVDVLAGETVSEIARRWNASGVTPAQSEKRWYRGTVKDVLTNPRHAGLRRYRTPEERAKIRQNPELGIVGKAEWPAIVDETTWRAAVRILTDPARLTGRAGAKGLLTGVALCGVCGQTVHRGGAVGRYPMYRCISGRHVSRRAEPVDEYVMAVVVERLQQPDAASLWAPELPDADELMAEADKLRRERDGIDDDRAEGLIDRVRWRTMNERIACRLGEIEAKLASAGSSSPLSIVASGHVEETWAALSIAQRRNIIAALVVPVIHPPGPGTRTFRPETVEIRWKA

SEQ ID NO: 548 - protein, 506 aa, synthetic construct
MAVRKSAKKVKTGRVAIYIRSSREREGGEDETLFTQRKILTDIAKNKGYSYDIYEEIESSVKEDRDELGKMKNKLVSCEYDRILVTKLDRLARDTGIFTDIKKICIKNGILIETTTEEIDLTKKTDKMMYNFKSLIAESEYDEIKDRLLTGKFNTVAKRNRWMGSVAPLGYRWDRNVKQLIVVPEEKEIIRKMVELALQGYSSRQIASKLNAMGYRGKKGSPFKTDRVLRILSNKAYLGMCEYYSSYLNETAIAKDCHEPIMTVQEYNDIQALIKSRVSKENLSSLGVKSPVNKILKCGVCGKGLTIQLNNKVRKSGKNYSFYQIRPCLHYLDDLNTVRCNNAGVRVSVIEEAVIEYLKQHKPEIEASIQKLESKDTSELENQLMDTIETVKSNISKYQRRLDKAYEAYLDDLITKEKYSKDSETFGQIINELEDELVLLRNKLSNLDTDAQKEKYMDAVEIIEKYELMSMEEQNASLRLLIKEIVYTRTNETNNVPHVTIIWREL

SEQ ID NO: 549 - protein, 465 aa, synthetic construct
MQEKILRCAIYIRVSTFEQSVHGKSLQAQKECLEQYATDNNMSIVGVYADEGKTARKELKKRKAIHALVEDVKRDKIDVIIFWRLDRWFRNLSDFYKVQDVLDEHGVRWISVSEPGINMETRDGRLQLNVVLSIGQNEVDTTSERIKFVNEASIRQKKLIFGDANMPFGYKTGVVDGKKCMVKDSETEHMVEDFFEYFRNHNSKKGAIRYMQETYGIDFSYGMLRTMLSSEFYKGTYRGYPYCPAYLSEKEWDEMQTISKRNIKNTPSGRIYLFTGLMRCPVCGQKLVGTGCSSIINRKTGEKRTYCYYRCNRALIDHICTYRHRVSQNLIEKYLLENLEREYEKYKVRTNQISEELKKQKKAKDPKKLRKEMERLNLLFQKGRISFEYYDTEYNRLEEEYVHSSNPCQQKEEARNTRYIEELLQTDFRQMYNSLLLENRRSFWRSTIQEIYLNDDNTIKAVDFL

SEQ ID NO: 550 - protein, 464 aa, synthetic construct; identical to SEQ ID NO: 63

SEQ ID NO: 551 - protein, 537 aa, synthetic construct
MCVTLHPMANAYTYIRFSTLEQQHGDSLRRQNEAIEDFVASNKLRLTESQAFQDLGVSGYRGANLKSGLGKFIAEVEAGQVPKGSYLIVESLDRLSRQRVMDALTLLVTLIDKGIKVVTLNDAGPQVLDKDAGLPALVIALSTMQRANSESDMKSKRVKAAWANKRKNAANLPVSSRGPEWLKFNKLEKKFEPLNERVSVILKIYELADAGLGRGRIVKHLNTNGYLSFRSPSQGWQTSSVTKLLKNRALIGFYQPFQLAYDEETGKKSREPAGEEIPNYYPSVIDLDLFRRVSTKKYAPTVPLKGRQGESLTNLFTGMTFCKWCEAPMTLTNKGPGSKGGTYLVCSKARRGKDCIYRSWKYEDAEIYILTALRGLDIGSILAGIDLDGRLKEVRNLIAKTAEQLDLDEKKISRYEEELTKSDESPSRTVIKILKALEESVDNGRRRLVLLQSEEIGLDSPMEDAKTFGDKLVKLYDEMETASPQERYLIRVRLRNRISQIVHRIELLPVKRNDPEFIRGAPKTKKYSWSSEMERGS

SEQ ID NO: 552 - protein, 525 aa, synthetic construct
MAYYGLLKGSNMKAYIYSRISSAIQKKGHGLDRQQDITLTYATQLGFDISEEVLQDVASGYHGKQMEGRLGVFLEGIKRGKIESPAALIVESLDRLGREHTMDALPRFIDIVNHGVEIHEVSTGIVYNREETHKIHIAIAIMERAHNESLMKSKRARAAANKRLQRAQQGENVVINVNLPCWIRSQDGKLELVPEYAVVIRRIFELYLEGKGSNKVAQILREENHPYFTSNIHSKKIRSRVWTDQRVMDIIKKDSTCGVFRSTVNPDTVIDGYYPAAIDKATFERAQALRMSRVRTAKKSKKGLNILSGLLRCGHCGSSLQYTRSYSNKKKTRMYENLRCRDRAARMNCDSRSVPLRPLEKLILGWVGTIPLFDIKAASNDELEQKKAELTQLEQQAENLVELLATGLTRVKDKYLQLEQQIDSVKKEISSLSVTNSSSVDKIDYFKAIDLENEEYREQVQQELALIIDRVSVKCDGEDAEIDIFLNSRIHNRQRFIGKKKQLDKARQTIRTLRPCAAHIDSFVD

SEQ ID NO: 553 - protein, 543 aa, synthetic construct
MPRKCYPYIRFSHKKQEFGTSVARQGDIHQFIEKHSLIVDTTLEDLGVSAFRGKNAKKGQLGGFIDLVEQGLIEPNSILLIENFDRLSRQKVIKSTQIFINLLNHGVDIAILDTGKIYSRDALHTSDFFLAIIEFERANAESARKSDFVSSAWTQYRAEMRATKAPKTRKTPSWIGVEGTIRTRPGEAATARFVVIEKEARKIRKIFELALSRGISETARAVNEWLEPDEPKYSLHQIQYLLKNRKVIGEHQPQKMGEDKNGDLKLAPEGGTILNYYPAIIDRTVFDEVQEQIKNRKPFAGRFSATRLNIFSGFIVCGHCNGTIRYMDKSNSEDPGKKQYLICTNSMTGKCVMPHRLTYEFNTIVWNVFRTVDKLNLSEVFQNDEAILKLNVSIKDEENSLADIEKQLTRFKNQLLEMLTSGKEISDTFNQMLIEIEKKKLLHVDNLKTLIEQKNLQVEQSEASKNFSRENILTLMNDRSDEGTRQRIKLNYHLSKLIRSIRLTWTKKPSGKRGIGDPSIGIFFTSGTYRGIQVGAAQSHLKS

SEQ ID NO: 554 - protein, 515 aa, synthetic construct
MKNVILYERFSSLGQKKGDSLVRQSRLCDEWCKKNNGKLINAYVDEGVSGFKGKHAAVGALSKILSAIENGYIERDTYLLIENLDRLSREEISTALDRFSSILRAGINIVTLMDGKVFTPESANNLPDLMWALMTMARANEESATKSKRASSVWLSKRKFVEGGGKPKFKTPNWLDYDEKKQEYKLNKHAASVALIFELYLKGKSINRVAMDLNELKTPPIGYSKKWSHSTVRWILDSKQTYGVLDAKTMYQDDFYPAAISKETFYKAQSELNRRKNKTGRTRNDKTPNLLTGLACCGVCGESITMQGKNHSSTGKAGNFKYLMCSTKRYSHVESHCGLPNFRYKYVEMILAVILSSIDTLPKSRDDKDNIVRIKTEIESIGEELEDIEKQIDNLIEALAVSKSDRIAAKLAQLEQNEAELKRNREALEVQYNEITLIEDDEKFEQRIRKLSVNIQNDEYRRELLSVLYKVIDEWRFNADGSISVQVSGNKINVSGVKGNVEISFPDRKIMIQTK

SEQ ID NO: 555 - protein, 530 aa, synthetic construct
MGIFMYTSEIYKSKQQLITPSSTRPLAFSYIRFSSKKQELGNSLQRQMEAAERWCAYNNVELSPITFDDLGVSAFKEGTRPALADMLEYIKTGIIPKGSFILLENSDRLSRRGFKHAVDIVHEIVNNDVYLVVLGNNPVVYDKHNIVDLSSMLSLLLDSDRGRQESARKSVLIKAAKKHLRSTREAKGKLPWWLSAVDGKAELNEFSAVIREMVDMKLQGVSAQKIATHFNNKGVLNAQGTAWKAVSINASFKNKLLYGTKVYYEVVGTNGRDCAPVEEVPNWAPAICSKREFDAIQPKKRVKGELTRTSAFTGLLRCPNCHGAMQQRKQYHKGKEYTYRRCLNYGEGRCTVKDNFKDVDVVAKAALQHLKVINTSSSNDELNQAIEQLNAAKNKLETQEASLAYIKIPEILGRTYDDIYKTQQEIAHLEASVQLLQTTSHEVNTISLFDLPNKEVNVELKKVIKAIYFFKLAPLTDKLIIQYVNDVKSTFVITHKRNGRSEATWKMQLVADSTKWDVADTREAWERDDS

SEQ ID NO: 556 - protein, 492 aa, synthetic construct
MKCAIYIRVSTKFEEQQSSLANPKLLFENYVLERGWTIYEIYTHIESGTNDRNRPAFKRMLNDAQEKKFDVIMAKELSRLARNSELAHKTKRIAEENNIHILTLDNAINTIKGDLELFGLRSWLYEQESERTSQRIKHTFKTKANSGLVTGGTPPYGYYLKDNKLYVRNDHTPNIVKRIFKEYILGRGFDSIAMRLYNEGEPTPAMVANKRNAKDKWHGSTIRLILQNEAYIGNLVQSKETKLSVTSSKRIANPKDKIIRVLETHEPIIDKDTFYLVQNIIKERKHKKYHQKTHLFTNIMFCNDCKKGMHFKKNRKGYVCGSFNKHGKKACSDHIIREEALSKKILNDINYFISRINDDKIFYDIESTISKCILDNKANLKSLEDEKNSLLKQKNEALVYLINKTITNENYKLFISAIDSKIEKLTLKESKLKSFNKELNFENLLNEIKTLRNEILDLNKLTPDVLHRFVKRIEIKENGDAIIYYRFSHLPF

SEQ ID NO: 557 - protein, 548 aa, synthetic construct
MQKIIYPYVRFSSEKQSAGHSHERQIEKIKEYASVNGYEVNDTLNLRDLGVSAFKGKNAEKGALAAFLKMIEDGTIPTDGTSYLCIEQFDRLSRQTVDEAYSLFRKILISNVNIITLMDEKVYTKKSLNEMVSIISSLLLMEQANVESDKKSKRVSAVFKKKLEKLRNGEKIQFAYMLPGWIDNIGTKQDPNFIINDQVKTVRMIIDMYLGGETMGHIARILNEKQIPQFARKKTKNAISSWNSGKISHLLVNRCLIGELKISKTGEVIKDYYPSVISKDEWDIIQSTKRTNATIKVAGRKTINIFQGRLFCADCGNKYYFETDDKTGKNGKKYIYHMLKCSGRRFHSCDSKSIKYDDLTNNNLFFFEKVLDQKTEDYYNKIKLEISQFENQIEELKKEQNELDLLLNNKSINFTAHAIANSKILDQIDILEKDIALNKQHIAFTMNTNMIDKFDKNDPVSVAKAKKFIKDNYAGILISSKYGTIISLMKSGQFIINPIPNRFDDSIPKASLQLFEIKEQIQNQDKKGLLDGKLKELLDAFNFLDRFE

SEQ ID NO: 558 - protein, 531 aa, synthetic construct
MSTDKQVDHGTSLEYQREACLRKAGELGIPNEFILEYEERGFSGEDIERPRMDELREDVKKEKIERIIIVHPDRLSRNMIDRLLVCTEFEKNNVELVFVDTEYKNTEEGKLFFNIQSSIAEYELALIKKRTRRGSIKAVKNGFVMPMRVPPYGYDYVDRQLVINKEEAKFVRKIYQWYVYDKLKIREIGERLSILGAKTKMKKSHLWNQSTINKILKNETYIGKFYYNKKKMKKIKGEKTKSGKPKRAYENRDKEEWIEVSVPPIVDFATFTLAENQRVKNTSHSGNVKHQYLLRKMIRCAHCGAKYSSYTTTSKTRSRVTGEVTSTHSYKNYRCVNKNGRVFGEGAKSCCSKILKANEIEKQIWEMVYDFIFDPSKIVHAGKEERANDSVRQAYDLLKFKLEEISKERKRILQLFKKGYIEENEMDLDIQKLNEKEKLIKIEISKYEDQIQDKEIDHQNKKDLIKFIGQIKNEIKNQDKISFEAKQKIISSLIDEIIVEWEGEQYNVSIVGMIGNLIKRRKEQTETFLAS

SEQ ID NO: 559 - protein, 513 aa, synthetic construct
MQENKQNLRFTALYCRLSSDDELKGDSNSIIHQKQILQDYALKHSLTPTEIYVDDGFTGTNFDRPDFKRLLSDVENDLVKTVIVKDLSRLGRNYLKVGYYTEVLFPEKGVRFISIADNLDTSVNDELNDFIPFKNIMNEWYAKDLARKQRAVVKSKGNSGIRLATRPLYGYKKAENGDWLIDEPTAAVVQKIFDLYLKGYGPASIANYLFANKVKIPSTIGLPKLNPEQNPYRWSKDTVAKILTCQDYCGDMINFKRSDVDSLVIFHDRQEPIISREIFAEAQKLRLDRKPVRHDYSEPVLFSDLLLCADCKSRMYAQRRYHGTTSYSCSKARKTQGCTSHYINEIKLIDCVKSDINKLIKNKGIVIKLAKEKMHIDTKTAQCANSQNLKNAKKRILQIDTILKNLYEDKVLGNINLATFKKLESDYLREQSELNKVIFEQSKIKVNLENRSKSICGFLKKLESYNNPVSELSRDLLIDLIDKIEICEATKNGNERSQQVHIYYKEIGKINLE

SEQ ID NO: 560 - protein, 561 aa, synthetic construct
MTVHELPATFSSRGEGEPYIGYIRVSTWREEKISPELQETALRQWAARTGRRLLEPLTYDLDVTGRNFNRKIMRDIERVERGDARGIVVWRYSRFGRNRTGNAVNLARLEAAGGQLESATEPVDASTAIGEFQREMIFAFGNFESNRAGEQWREAHEYRLAAKLPASGRARFGYIWHPRRVPDLSQPGGWRLQQERYELHPDYAPIVEEMYERKIEDHDGFNNLAHWLNEELNITTTRGRPWGVSSVSRFLDSGFAAGLLRIHDRDCKCGYGANPKMHRCPNGRMIYLAGAQPPIITPEQWEAYREHRAETKRTPPRARRATYTLTGLMRHGYCRFHMAAASNSNRHGPPEPGFWLVCSRHKHSNKLECPHGINAKREQVEGDVLRWLAEEAAAGVDAAPSVPRQRAEPAEDPQARVQRERARLQAELSKVDAAIDRLVTDNAMHPDKYPVDSFERVRDQLLGKKSTIVGQLRDLGEAAKLPTREEYKELVVGLLAEWKTIQPIERNAILKQLVRRVVCYDERDDRGRLLNVRTEIHPVWKPDPWASHPDEVIHRRDEPVR

SEQ ID NO: 561 - protein, 500 aa, synthetic construct
MASSNTGSSDAPDRPLRACAYARVSLDLKEGAGVDRQLKACRDLARLKGYDLLAEFVDNDRSAYSGKARPEYSRMIAGLKAGKYDRVLCFHTDRLARRTVDTLDLLNLLKSTGAKVEVVTGNGLDPSSSDGELLGTILAAISQAESRHKGERVRAAQEAAARAGKPRRGGNRTFGYEHGMAEFREDEAAWIREAARRVLAGESVRSICQDMDADGVKTTTGGIMRTGVLRATLTNPKIAGYATWNPRRADGRLVKSDRQIVGRGQWEPILDEDTFHAVEAVLRDPARATNHRGNQVRHLLSGIVRCGGCGRVMYINSRKTRDGKGRRYFYFCKGAQGDGSGARRGKGHYSRAREPLDAYVTETLLARLERDDVTELLARSTGAVDAVDDLTRRRDELRQRLASLDEQVAVGRLSVDRYTTVASRVEDQLASLDAELASHVVDTDGVLASLAEAPDVRMWWSDAPLDQRRALVDATMTVTVYAGMTGGRFDPDTVKIEWKV

SEQ ID NO: 562 - protein, 420 aa, synthetic construct
MIVTLDDGLTYDQKSANSNHLFLLVAKVQQAYNYSEALSRRINAAYDRRRRAAKEGKAVKRHTPMWIDKEGKLIESVAPLVRQAFEDYAAGLGERRICRRLRESGHELLQTINGTTVKRWLTNTTAIGNWGEIPNVYEPVVPKELFYRVQEQLSRNKDQKRSAPTAYLLTGLVKCGHCGRNFNVKKHPNTGATMQCTSRARLTLDGCSNSRSIPKQLLEHIRVKTSLPYVERALAGQLLTEHQKRKIEIEGELEDLSKRIGNLANTIAAIGLVPEIQEQLEQLQAQRKQLQDERLILDRSTDDAVSTNTIINVEHDYLANDPIKLNALLQQAEYSITCFSNGEIWVSGDEHPWKYKGYDRSAKSYVYEDLGQEYRLLMLRPEHQELLDRVNKQPLPEPTPEFNDLLSLIARGHRRRGDDA

SEQ ID NO: 563 - protein, 543 aa, synthetic construct
MTKAQAYSYLRFSTPDQFKGDSFRRQTVMAEDYANKHGLELQELRFKDLGVSGFKGMNLKAGALGRFKQEVESGSINPNSWLLIEAWDRFSRMPTEYVLPEMLSLIDMGITIVTLKNGGKVHRKGNLDMTTLLTCVIEMSQANEFSQNLVRRISAAKESKRQSIKLTGTGRMSSNCPLWMKPKGSDGFELIEERAAVVKKIFELTIEGHGRKAVCNYLIKNEVKPFSPKARTWHTSYIEKIIKNHQAYGSVQLYKNREPDGDPIRGYYPAAVSEDVYLAALHATRKRKIADNKGVTRKSRVNIFSGLLWCKCGDMLRLKNNGKGQFYYKCINVLEHRGCTARTLKQKPTDEMLIQALYLLGDKLVISGGVDKEDMSNVVAIRLKEELVKTESKRDVAMNRLLEFDSDALSSAFRALDEEVKTLQSRLNVLEQETASVRVSLDTEELGSLLDNLSDTLNGTCVESKVKTANALSQVVERIEFGNGKVAVQLKTKLPDYFDDMPKRDVLNIFIKDHGKTWATEGLRAKTEESIYSQRKPEGFKKS

SEQ ID NO: 564 - protein, 569 aa, synthetic construct
MTIAYSYLRLSTKEQIKGDGARRQFEATIKACEEHGWQLSSTTFKDLGRSAYHGHHLKHGDFGVILESIREGIIPSGSVLVLENVDRMSRQDPQESVYLMLDIIRAGVKIYTLHDRRLHEKESKDSFMNLMVWALAAERAHDESRVKSERVRQAKAERRRQAREEGKAIVGRVPSWIRKVTPKGGEPYYELDEERAEVIRLIFQLKLDGHGLGAITNELVRREIPPMGNRKLSTGEMKWQVSTIRKWLLSPTVYGQYQPHIRVDGKKVPEGDPIDNFYPAAVDRETFLKVQAVLGKHNRGRTAEEGENMLRGLLRCECGGNLSLHITKRGDRRYKYLRCNHDFMDSCTSKRFDYDGVESLLLQTLQSIDWSSVLGIQSDKNKDAMSTLKERKVVLDEDLNETNKRMTNLSKQLEALDEPSMFLLNRLSELEKHATALLQELGEVSEELEGLEHAVETSSNSFKQGSEIIAFLGLPIRSIDPEELVKKRVKMNAILRREIDHIYVSKLNEDLWRWSVVATGGESLFDLDINGKCTDGDIASAHTGLCGVQYKKVDRRKFNRVKKNSIEFS

SEQ ID NO: 565 - protein, 493 aa, synthetic construct
MNAAIYARVSTDKQAEQGYSLGAQIADCTAKARSLGATLVQEFIDDGYSGAYLDRPALTSMRDAVRAKMFDFVVVYDIDRLSRNLSHQLLITDDIESAGAQLHFVNADYKASAEGRLFYAIRGAFAGYEREKIRERSMRGRVAMLKQGKVIEDSHVYGYDFDKENHCYIINELEARNIREIFRLYLMGFGGTSAIARHFNANIDKFPPPNRRKWAVSTIHDILKREMYTGRFFAHKTYHFRTGLKSERRIERPPDEWIPMQCPPIISDEEHKRAVELLSKNRTFDLHRKRTPFLFQGLLYCTQCGRMLNVRRNGKNVAYYMCIHNQNDGNFASCGSRNFQCAPTDAALWELLESICQSPEAVENYIRKSLPPPAPGAGAEDARQQELSRIHQERQSILQWVGDGLISHEDATARLKALKAAENRLARVNTCKPLAPVRTDAGAVYEAVRNCPPTPDAKRQIVRQVIDHINIMRTDAGTGRKHYQFDIQIFFRK

SEQ ID NO: 566 - protein, 589 aa, synthetic construct
MENEFSPGGKPAPATAYSYLRLSSKRQANTEDSKTYRDGFRRQIALRDEYLARNPHLTLDTRLVLHDIGVSGYTGANVARGGGGKLAAFLAEVEAGRIARGSHLLVESLDRMSRQQVGRAQAVLLSLVNSGIVVVSLTDGQVYRESRDASQFIMSIMSLTRAHEESVVKATRLRQTWERKRQVALERPISGRCPAWLKVVDGTFVADDDRVEVVREILGHLADGIGRDRIARILNARGEKPWGHGTQWHGGTVQKLTDNRALIGEFQPHKLVYEERKGVMVAKRVPVGDPIPGYFPRVVDDELWTRARAVAVKRRLGKAPNAGGRQGTYVTNLFGEVAACRSCGKRMTYRDRGPRSFAVLRCSGERAGTCTNSYRFPYQDNENAILSWLIKVDFSGKAPGEAARLDEEMRRTIAKRDEMQSRGEAIVRDVGVSSRFAKAPLAEIEAELNVLEVRISELGAQALALKASGGAEERRMAVAHLIELHQDKAPVEQIFAARWRIRQIIRETVAEMWCHPEGYIDILTIDGEIHLFRDGYWWCAEEELWVPWAGAAFGGGYWATKKELARRRVWLEEAYRIREAKLGSKEESA

SEQ ID NO: 567 - protein, 456 aa, synthetic construct
MKTAVYTRISFDRKNTGAGVDRQLEGCENLAKELGWTILHTFSDNDISAYSGKVRPGFEALIHAMKTGQIEALICWHPDRLYRHMKDLERIIDIADSQHVEIRSVQGGTIDLSTASGRMVARILGSVARQESEHAGERRRFANDQRAAQGVFYTSGPRTFGYTQKGEPMPGEAEAVAKAAEDILFGKSIRAVAREWNEQGFRTTRKQRAWTGTAVRGTIVNPRYAGIHVHRGKVIGRGDWVPLISEDTHYSLVALMEDNKPSSDRSFERQFQGSGVYLCGVCGTPLYQFSGGKREARSYKCPKYHVGRSVEKLDDYVSRLVVGYLSRPDAPNVVDVEEPTVDLAALRIKRDALQAKLKSLTEMFTDDHIDKDQFLSGTADVREKIAALDAQMVVINKASPVTYLLSQRDRVGEAWEELSPDIRGKAIQALMTVRVLRMARKSPRFNPDDVEVRWLL

SEQ ID NO: 568 - protein, 480 aa, synthetic construct
MASSQPRAALYARISQAVEDVDKTANQLARLREQAKLSGYVVTAEFEDDDISAYQGKRERPGWDALLSAVGAGQVDVVMATAPDRFTRGSAVELEAFKVLCARNSVKLHTLTMGVQDPDDPATAAVMQIMDALGGLEVAQKTARQHARISDDVRNGISPATRRVFGFEAVKGRAAGIRESEAALIREAVDSILDGGTVYAVAKAWRDAGVKTSLGTDWTTSSVKRTLLRPRLAGWLTHKGELISPTLPAIISQEDHEALVTLLNDPSRKVKPGPKETALLSGIMQCRCGGTMVRSSYRGKYFCTVDTSRTKGDRSGPHQSIRLEVADAAVEDAVMELLSDGTLEAPQSAEDIRAVQAELDANGRAQDAAQDVLMDPDIKDKRRAKARVVELEAARAVLEDKRDALIAKRAQGSAFDEFMEHFQAGWTEDTSADAAAYDRASASWNALSMERKRDIIRGAFDVTLGEGWGAARVIARRKSA

SEQ ID NO: 569 - protein, 552 aa, synthetic construct
MSETLHIYTRVSTVSQEEHGTSLETQKELGIKRANSLGFSNRVWNEGGQSSSKDDLDNRPILVELLSLIDGGSVRHLYVFNTDRLSRNQKTWGMIRYKLNQNKILLYTGSDPDPIDLQNPMDDLLVGLLSEISQYDNKLRKERFRLGKLKRVKLGGWFGGPPPYGYKLEDGLLLPEPNEVKWVNFIFQNYRNGKTLDEIRDLLLDKGVLTRRNKPVWSHGSINKLLQNTHYVGYFQMTDSKSGETVKVNCEPIVSPTLVKECNNLRKKRSYTSLGGTRAKDPNQKNFYLLKSLLVCGSCGSRFHGKIIPSQYRSIYYCPSKEGNYKKTHTSKFLDCKSSRPSIKIGLTDELVWNTVVDVVSNSHLFKEDIKNELLGSSYYRKTIFDEKKSEKRLKLIEKDIENVNNKIIALETEQLLQEKTKSDIKKILKSLEEYKLNKQSEREELIGTLDGFKKQSKWVYWVKEFSSKIENLRSEQFTPQMKLDFLSGIVDKITVNTVNKNTHELIIHFYFDYVRDGLKWKDLTNKSLGYNLTKGSKDMSVQLVSLKKELN

SEQ ID NO: 570 - protein, 452 aa, synthetic construct
MRAAVYLRQSVDKLGDELAVSRQREDCLKLCERRGWTPVEYVDNDTSASNGKRRPAYTQMLADIRAGRVGAVVAWDADRLHRQPRELEDFIDLADAHKLALATVGGDFDLSTPTGRGNARMKGVFARMEMEQKSARQKRAERQLAESGKPHRGGRRPFGYTRDNKVFEPEASAVRDGYADILAGATLHSVAARWNAAGLKTTAGNDWTGTTVKQTLTKPRYAGLRAYHGEIVGKAEWEAIVTEDVWRSLCDLLAQRSPSRPFPARKYLLTSIAVCGVCGRPVGSSAKTDSAPVYKCKECGGVTRQIDKTDRWVIEHVVARLSQPDAAQVLVRENRADMPALRAEANALRSRLDALATDFAEGDLTASQLRTATERIKAKLSAVESQMFDANSRRMFDGLIGAEDVRAAFDALPLDRQRAVVDALLSVTIMPVGKGRAFDPERVVLKWKTGRG

SEQ ID NO: 571 - protein, 480 aa, synthetic construct
MPRRRGLSAAPTGTRRYVAYRRVSELMGRGGDDFHSPDIQLAAIHRMAKPAGLEEVGPPVDDIDRTGRDFSRDGIDQVRRMAAAGQIDVLAVYKVDRFGRNVLESLQLLAELAAQGVTIMSATEQIDTSTPSGRWMLTNLLAIAEMQSDEIGRGWSNTIARRAEKGHHHGRPLGYLRVNKRLMPAPTLGPAITELFRRYAAGDPIGEVTEYLAAIRGKTMHTANVKKLLRNRAYLGHVVTGDDVLPGEHEPLTDEVTWRRVQARLAAEAGTPPRHLAPTWSLVGLVECPQGHKLQRQGDRLVCGHGRGDVKGGTCPGVGRPVLARVEAEVLRQVAAWAAELRTDHHARARRLARLAVARVDRATLERQMTDARAGMVNLVKERALRRVPEPVYRQALAELRASEQAAASQLARLGPAIREPDPEAAAGAADSLLALWGDAEVTHAERVRALRSIVGRIVVRSAARWREPEHDRVDVQFYL

SEQ ID NO: 572 - protein, 472 aa, synthetic construct
MAKVAIYARVSTLNQADEGYSIQGQVESLTKYCEAMSWTIHDTYIDAGFSGGKLERPEINRLINDVKLKKFDTVLVYKLDRLSRNVKDTLFLVKEIFTDNDIHFVSLKENIDTSSAMGSLFLTLLSAIAEFEREQIKERMMFGKLGRAKSGKTMSWTTSPYGYTYDKEQGKLIAIPSQAIVVKKLFDYYISGMSIANMLRKMNAEEQIGRTAEWSINAMKNILRNEVYYGMVKYRGQLFKGEHEPFISKKTFELAQIERERRKQYFSKKFKNTSPFKAKYMLSGLLRCGCCSQPLISNVQRKSANGRTNIFYQCKERYNKDLSKRCTESGRFRKEILEEFVINELSKIKINNKYVENFSKDEPKIDINNLKKEINSIEQKLEKVSELYIDGIVTRDILIKKSEKLIKQKEFVQKQIDEMDTVSEKDKMNIIKKTIDRWNPEKTSYEDTTLLVRKLVKYIVVDEERIDIFLNF

SEQ ID NO: 573 - protein, 557 aa, synthetic construct
MLQSNKITALYCRLSQEDMQAGESGSIQHQKMILQRYADEHHFLNTKFFVDDGFSGVSFEREGLQAMLQEVEAGRVATVITKDLSRLGRNYLKTGELIEIVFPENGVRYIAINDGVDTAREDNEFTPLRNWFNEFYARDTSKKIRAVKQAQAQKGERVNGEYPYGYIPDPNNRHHLIPDPETAPIVKQVFAMFVSGVRMCEIQKWLAENKVLTIGALRYQRTGQARYQRAMIAPYTWPDKTLYDILARQEYLGHTITAKTHKVSYKSKKTRKNEEEQRYFFPNTHEPLVDEETFELAQKRIATRHRPTKAAEIDIFSGLLFCAGCRHKMYYQQGVNIEPRKFSYSCGAWRNRARTGSECTSHYIRKNVLLDLVLEDMRRVLRYVKEHEQDFICKATEYGDMEARKALAQQQKELFKAQARMTELDTLFRKLYEDNALGRLTDERFVFLTSGYEDEKKSLAARIDELQQQIATVTERKRDISRFIQIVGKYSDIQELTYENVHEFIDRILIHELDRETNTRKIEIHYSFVGQVDTEQEPTQVVNHDRRNMVDVKSIAI

SEQ ID NO: 574 - protein, 559 aa, synthetic construct
MLGIYIRKSVEREREKSINEQILLGQEFALENNMEYKLYNEGIISGQKNKENRPKFSELLKDIENKKITSVFIWDSSRIARNEGAWYEFAKLLSDMGALLYDNGVKADFRDENTFLFYTITSGMNAHFARVTAKKIKTVLKRNAIGGLVHGIAPYGFTADKQSKWTTHKDEVENVKTIFDLYEKGYGYIRIANYLNEMGINARYKTGWTPATIRYMIYNKTYSGRAKFNNIEIKVPQIIDPIRHDKLIASIGNRYKKPGAKSKRYILNEVLVCGKCGTRYTVSQRKRHSYYRCLSEVNRGVPKCFSKAVRSEHIDKLILEKVLLGNELYELAEQTYLEGGNVEQKKELEKKLSYHNSRIKKLEGELKRSYQVYVKGGVELDLFMSEKKRIDRQLLKTQDAIDNLNVDLERIKDTNRLLEDMSLDFNIDLPDIWKGETNPSMKFLKENAIKQAIRANRLEKNKETMVETMPFDEKVAMVEKYIKQIKVDYHNLPLKLTIEFNIPVPPMQLIMESRYYAAMDIKTKRMHLLKDLGKKPSFIYKRTKQELEENIKRLDINTL

SEQ ID NO: 575 - protein, 501 aa, synthetic construct
MSYCIYLRKSRADTELERLGEGETLARHKRTLLSLAQSKSYAIGEIYEEIVSGETIAARPQMQRLLSDVEQGRWDGVLVMELERLARGDSIDQGIVAQTFRITGTLIITPNKVYNPLNEFDEEYFEFGLFMSRREYKTINRRLQAGRIASIKEGNYIGSAAPFGYNKVRLDNGKGFTLEENDESPYVKMIFDWYVNSGMTAGKIAEKLTLMGVTPKKGGSHFPTESVRSILRNRLYTGKITWNWRPVKKTVEHGMVKRSRPRNDESDMIIVDGIHPALISEELFEAAQERTGLNPRVAVSRELVNPFAHVMVCKGCGNAIIRKPSKKNPDYLICPNKYCGVSSAPFDIVEKQVLERLAEICGKLKLQSDKANKSQEDTNTLQIDKIEKELAKLKDQQNKLYDLLEQGIYSQEIFLERQQVLNDKRSSMQKELVELRSKIPAPVDYTDIIASIERLLSEYATLSVAEKNSLLCSCVRKITYYRDKSNRYDQKPVSMEIELKV

SEQ ID NO: 576 - protein, 574 aa, synthetic construct
MTKLQLHVYTRISKTSQQEGSGLDEQLTRINSYIDDKKYLFDLNTIQYWQDVGVSAFKNKNIEDGSALGELLDKISTGVIGTGHALVVYSLDRLSRRSNWDEYIIQQIVKSGCVIHDVSTPIVLDRNDPMSKIIMELIISRANNESKIKSERSLSGWAAKVAHSIKTGAALTKHTPSWLRIDNGKYEVVEAEVKTIKYIFHDYIIVGLSAAMIAKKLNDSGDYVRRWRSNSVVKMLNDERLLGTLTRYREKTKIDNFYPAVIDIDIFLQAKNLLNINSSGQSKSRVAKSGGLHNIITGFTRCGCCGSKVTTTVNGKRQRFIKCRKRLDYLNCGAKSIKLVNFEQVVFQHLKQLDLSKIFKESNDDYERENLKLELASLQVDEKTIIDTIETRKLEKKKVSIQLLDGLTEIQDQIDDINESIQKKSNNNSTLDIGSIDISQLMNPDNIEIRMKLRKFIMLILNTVTFKQISKEHMLFEFNYKNKVLKHIIITDKKIENVLHEISIEGDDESHITYRIGAGTFIITEDVSANTVHLVGLTDTTSYFVLVNYIGSLGKNELVDFMFNEEIIDLYTTK

SEQ ID NO: 577 - protein, 482 aa, synthetic construct
MRAAMYLRKSRADHEAEMRGEGDTFDRHRKTLTELAKSKGYKIIRTYEEVVSGDSIEKRPQMKRLLHDVRNRMYDAVLVMAIDRLGRGALEDQGVILKAFKESATLVVTPFMTHDLNDEVCEEHTEFQAFMARREFKLINRRLQMGRLAAAREGRFISPTAPYGYRKINKNELEIVEEEAKIVKMIFDWYIDEHIGAIKIAKRLNSMGILSPKGGKWASSFVLQILKNPVYIGKVKWGGIEADGTHSPIIDSERFELVQNNRKKQLTPKHSTDLKNPLAGLVFCGKCGRAMSIKYGNTQTYLYCRGRATGTGCPTKNVRLDHLEQMVLYELKGWLKDYQLNPKITRQQENKLEELSFRLEMIQKEMKQLKKQLNNVFNLYERGKYTDEIFEERSTALNKQLNELRETYGETEAEYLKVNESVEANRTVIPKLTHVLDIYDRLRPLQKNILLKELVEKIVVKKEFLRAPIQMVVYPRLLKGGD

SEQ ID NO: 578 - protein, 518 aa, synthetic construct
MRTILYARFSSDLQNPLSTADQLASLKERADREGWTIIDSYFDEEISGRAGISEMQRPGLNGMLARVERGDVDQVLAEATDRVARHIGDAHAVREHLEHFGARLFTLADGHVDEITGTIKGLMDARFLKDLADRVRRGQRGQHSRGFNAGGRSYGYRVIKPIDADGEIVRGILEINEDEAAIIRRIFEESIAGVPARAIVKALNDEGIPAPRGKRWNVSVIHGGRARANGILRNQLYRGIKIYGRFSKTFHPKTRRRVLRPNPINEWRFVEVPHLRIVTDEQWAQIETRYAAFDGNIRKQKRHPKRLLSTLGRCGECGGVWTVIGRERWGCSTYKAQGDCTNSRSISTPLYEDGVLGQLKAVLLNSDAISLFVERYNAGIRARQSEAKMNRAPLERKASDLRARVTRLVDAIADGAGEFQEFKDRLHTARKELRDVESQLAHLAADTPIELSKDVAERYRAYVIELDTALAAEGMARERAAGAIRALIETITLIPKTQGRGVDIQVTGRMAEIINLAK

SEQ ID NO: 579 - protein, 408 aa, synthetic construct
MNEIRRVAIYCRVSTEEQATEGYSISAQLQTLRQYAQLYGWEIAGEYVDEGISGKNITGRPAIQKLIADVENNKFQAVLVWKISRLSRNMLDTLTLLDLFEANDVKFISYSENFDTGTPIGRLVVQLMASIAEMERNTLSENVKLGMKQRAYEGYWNGGIVFGYDVVDKALVINEKEAFIVKLAFELYAEGKGLKAVANHLNKAGYRTKRGHHFSVNGVAQILDNIVYNGKISWAKVENWDSKRRKGKNPNSIIVEGKHEAIIPDDLWNIVQAKRKSRSFKQRQSNEPFLLSSLLRCPTCNQGMVPAITTWKSKDGTKKKYRYYVCSDFHNKGSSACHANSTKAYEAEAQLIERIEKFAHSEQQLFSKLQALNTTSIELLHSLSTELEDIKKTTARNTVASKPIFRCL

SEQ ID NO: 580 - protein, 547 aa, synthetic construct
MENKKVIGLYIRVSTEKQSEHGFSLEAQQEEGTQAAQRTFGQDIVIENYVDSGISGKNIKDRPALNKMLKDVAEGTLDAIITYKVSRLSRSLSDSLKIVEEIHREKVRFISIKEGEYGTPHGNLQFNILASVAQYQREEIAENVQFGMSQRAREGKWNGGQLLGYNTVNKELVINQEETEIVKLIFDKYVNEGWGTKKISNYLNEIGKRTKKRKTFSIVSVSTILDNPAYKGYIRFNQVVNWETNRRKGKNPDHILTKGIHEPIIDEKTWNKAAELREKRRTGTPRQYSGTFPLTSIAKCPECGSYMTSSYGSKRKDGTKKRYYVCGQYHNKGKSVCEPNSIDAEWLEKAVFDRLTKALQSDSVIEDITERMNKQMEKHPMYAEQSKEVKILQSQLTKLEANKKRIQDSVETGSGIYTEEEAIERINGIRAEINEIQNKIFTLTENQPKNATSMKPVTSELVRQQLQEFFDLSTYLEPMQFRELLVASIVKIEAKKKNLKRIHFSFIAHMPEEESSNSIPSFIKHIIRKNNLYNKRIPLINYKGFIF

SEQ ID NO: 581 - protein, 590 aa, synthetic construct
MDAIIYIRWSSLEQTKGDSYTRQINRCSAFCEANGYNVLETVVDEGRSAYTGENIHTGNLGKLVERFERREVPQGTLVVVEQLDRLTRLPALEVVGWLTRVFPTGIRFVTADRGTMVSRAAMEADQLSFMSLIFDSFRSHGESKRKSDLLLDSWQSRRNGVAEGRKRNITGVCPAWLRWDREANEFIAISDPDPRLDRKLIVQRIFNERDTGVGHAIIARKLNEDGIPSWGVGKRKADGWHPSYVYKILHNPAVIGEFQPRSRRKGEVTGTKIGQPIPDYYPQIISPAQFERVSAAKQVMNVGGGTKGRVNLLAGLVYCGVCNQRMIYLKKANAGRTRTNPKTGTITIDKSNGIYLKCSGAHRGHRCDHKASFNYNWIADAVLDNLLNSALRDNHFEQRSAMVQLADRLASARRELERFEAQAQTALDMTLDPAFKHDQRIKQRYVDLGRQADQQRELVDKLDAELAASKGQVSPAEHLSRVASVRNSLDSEDERIRDAARTKVMDALQRLVDRITFKSDRTVEVSALDGSLGWQFDDKGNLLNRFDLTVGLHEERLRNAILRRDNVDRQDIAQEIEEMKKRRLDALRGS

SEQ ID NO: 582 - protein, 635 aa, synthetic construct
MPQLYSYIRWSSDRQEKGTTRNRQVAAAKAYADEAGLEMVEIIEPGVSAFRGKNRAGKLGDFIDAVKNNAIPSDSWLYCENLDRLSRDQVDEALRLFLELIGLGLTIVTGMDRKVYNRESIRQNPTDLMISILMFIRGNEESETKSNRTVGNVVALVERHKKGLPVNIKSVGRHPFWIDDSGSQYEAVKEHPVYWSIAREAIDMFLAGDGIYTVKRYLDQKYPNGLKGKEWDYQVLKKMRDNRALIGERTINVAGATYKLDNYYPWLCKDEAEFLTLAERKQQNNYKGKKDKVEEIKLLSGLQVLRCSKCGGTMHSFMNHGSARYICTNGVHLQKNCSGWSISAQLVEHCTMISLLIAYMDKSHKDGIDTTAIEVDISRKETLISDLESRIANTAQAIAIAPDVSALAVQLNAFDMERKNTILEVDKLKERLHSLKGKGSFGVDVTEFLVLIQWAVFTNMEDTDRNKIRKIISSIIESVVVDKTDGCITIKIKYYHKDEWLVFGGVNRKPYWAFTVEYSTDDEMGIEGKNSSDFISNPLFQKAVEQLDSIEQSYLNLFETANTMLGVVGYSEIRGSSFWPNTGQYERVNVEYEGVTYSIALNGRVPKVIASALEATGLSRKDFIARFKVCKAEKR

SEQ ID NO: 583 - protein, 447 aa, synthetic construct
MYAKRTGQSARLIIREGSGYRRNPNLKITTDIEQFDLHLKAAEAASGSAERIDELRKAVELYISVKIRSQLDIKRKMGDFIGAFAPYGYRKDEANRNRLVVDEEAARTVELIFRLRIQGLCNSAIADRLNSMGVLSPMEYKQAQGFNYSCGFRSNEQAEWSPMLVKRILSNEIYIGTLIQHKSGTPNHKIKKRVEYDRDEWIVIENNHEPIICRSDFDTVQNLMLRDVRTAPKQEKVHLFSGFVFCGDCKHTMVRKTVPSGGKKYHYLVCSTNKAGKGCSPHTFSEDKLKSIVFRVVNDHIELIAQVEHVLDYIASLPEQERRIINYDAQMTALENEIKRYQDLKINLYSDMADGVISREEYKEFHAGYDRRIADRQRQLGKLKDERSQAMENIVHLIEKILIYDGKRIEVCFRYRDELENALQYIERFEDVLPAEEGVTIPERRNA

SEQ ID NO: 584 - protein, 538 aa, synthetic construct
MKVAAIYTRKSKYTGKGESIDNQVKICKEHLSKNNISNFIIYEDEGFSGKNTERPKFQTMLKDAKDKKFDILICYRLDRVSRNIADFSYLIQKLEKYDISFISVSEQFDTSTPMGRAMMYIASVFAQLERETIAERIKDNMVELAKSGRWLGGRTPTGFKSTPITTYDNELNERKMFMLSPINEELKLVKLLFKLYLEKKSLSQVVKYLLSHNIKTKMDNNWSKTNVLSILTNPVYVKTTDEVFDYLNSKNIHPLGTPDGVHGMLSYNKRKGKSGPSRDLNEHIYSVAKHEGIIESHDWLKVQNILEKNTSKAPRLGKTHTALLTGIMRCGVCGSHMKIAYGSINKKTGKRHYYYVCSLKRDSGCTRCNNKNIRGDIIENILIEKLKEMTLDEGVFINELKRHQEELYGKNSTLSKIDELKKQIAIKDTSIENLLKSISLTQDKNISQILVNKLEEISKEKLTLENTLNQYENRDKKNVSDNKNFDTIIYSLRNFKSLIDISNIYEKRLLISTIVDKIYWYGDKEIMDVRFWGAETIQ

SEQ ID NO: 585 - protein, 458 aa, synthetic construct
MKVAIYTRVSTLEQKEKGHSIEEQERKLRAYSDINDWTIQGVYVDAGYSGAKTDRPELNRLKENLSKIDLVLVYKLDRLTRNVKDLLDLLEIFERENVSFRSATEVYDTSTAMGRLFVTLVGAMAEWERETIRERAMMGKQAAIRKGMILTPPPFYYDRVDNKYIPNKYKDVVVWAYEEVKKGNSAKGIARKLNASDIPPPNGIQWEDRTITRALRSPLSKGHYFWGDIFIENSHEPIITDEMYNEIKERLNERVNAKTITHTSVFRGKLICPNCNGRLCLNTSYRKLKRGDVIHKNYYCNNCKINKNGAFSFTEKEALKVFYDYLSKLDLSKYKTKEKEDKKIVTIDINKVMEQRKRYHKLYANGMMQEEELFELIKETDEKISEYEKQKERVPKKRLDVSKIKKFKNILLDSWNAFTLEDKADFIKMAIKSIEIEYIHVKRGKTKHSIKIKNIDFY

SEQ ID NO: 586 - protein, 482 aa, synthetic construct
MGTIKDVAIYLRKSRKEEGLTDAEALSNHREILTGLADRNNWKYTIYTEVASSMDAENRPELQTLLKNLYTFNALLVMDIDRLSRNRYDSAKIMQSLKLNDIKIVTSDGKIIDLNDEQEEVMTGMQEVFANYEYNQIKKRLHRGKVSSAKQGNWVSGRVPLGYYYDRTSKKLVRQEEEARTVELIFSYYTQEMLSLREIAIKLNQTGLRGKRGQPFNAKSVQRILVNDVYQGTTSQHGFTTENTHEPLISKKMFSKAQELNSQRSIKGSRAKEQKHSLSGIVKCGFCGYSLAIQVRQTAKGEARRVKGCGRRDLVSGETCRNKTTSYDLVLNATIDSLSPHRQEILKKMEELIQFNDKFALDKNNEKEHLEDALNKADKKLMKIARMVLEDEGNEQIFNQMKKEILGEKEHIIKRLEDLSHLTVTDQLEDYERIVDIIDKLLHQEKKLTEKDLNSLLLRVIMRVDLFNKEGHEKNIKIIFKD

SEQ ID NO: 587 - protein, 460 aa, synthetic construct
MIIYTRQSMDRTGEELGVTRQREDAEQLAKLRGWTAVRTLTDNDRSAAGRKPREGFEALLQALERGEAQAVIAWDWTRLERNRRDGLRLIETCQKHGVTLAFVRGADIDLSTPAGRLVADVLSGVARHEIDQKSDRQRRAMLQAAQDGRWVSGRKPFGYQPDGVTIVPEEADAVRWGFDSVLSGVPLAEIAREWNARGFSGQSREWKWGSVRHVLANPRYAGLRAHSGEIVGRAVWPAVVSEETWRAAQDIFEKRAAMTTPRGARRLLTAIGRCGGCDATVHAGGAFSTYPMYRCGGYTKSPGGKADPSVRHVHRKALPIEDFVSRVVIERLSQPDAAELLIDRKRPDTGALRAEAVALRERLENLAIDYADGTLTKSQMRTANERLTMKLNVIESQLADAGRVDVLGPLVKADDVAAVWETLGTARQRLVIDTLMIVRLDSPGRGVSVFRPETVRIEWK

SEQ ID NO: 588 - protein, 576 aa, synthetic construct
MCGMTTPSSAAAIYVRRSSGRAGTNKTLSEQEQEARKFAASQGLEVVEVYREREGTGASARSGKARPQWEAALAALDEGSRFHTVIVWALDRADRRGADTLGALLSRHAATGRRILGLDGTDTSDPQQRLANIIRGEMAREYSEKLGDNIARTKRYRRADGLWLGGKPPWGLRKGADGKLEHDPETYPEARAVAEALLEGKTLYEITGDLNDRKVRLASGHPWGATVTRKARGRDEDIETPPLKWRIPTLAAIVRSPGWAGLQSIRIRETQADGSKGGWPHVAEVYRHPETGEPVSVGEGVITPDERAHILARIEDRKRGGRTGAVGAKPRASLLGSRLRCAECGELPTVHRTSKYSYYKCGSLAMGPGRCGGYGCPEEDMNDYVVGRALIFLSSLDPEDEVTRSAFAAWAGEADPAVRAELTVREGALAAAEAELARVRRLAVVGILTEEEAAAELPRLRAAVGAAKQALTARSESDLVTPESLRDLQYLAEAWDDLDRAAQRRIIEAVVREVRVVKAPYRGARFSGPQRAIITFVDGSTWPRDGELAEHPGRSPETLKKLAQRERRAARLAAEG

SEQ ID NO: 589 - protein, 537 aa, synthetic construct
MIGNQIYKCADYLRLSKDDLGKSDESSSISSQRMIINSFAKYNGLNLVKEYIDDGYSGGNFERPGFTEMIQDIENGLINCVITKDLSRLGREMYGTGKYIEEFFLEHNVRYIAINDSYDSLIGDSMLGLRLGVNDLYLRDVSKKVKSSFRVKQEKGEYIGSFPCYGYMKDPNDHHKLIIDPEASEIVKLIFSLALDGHGVCVIAKKLTERQIPIPIVHKKEPRGLKVTENNGNGIWKHSTLRNILTNEMYIGNMVQHTHEKISYNNKKCRKTKKEEYIVVKNTHEPIISKEDFDKVQEIVKKRHTTPKERDFDNYLLSGLLVCGNCGRSLGITYKRTAQTQTKYTSCNYYNRKGKASGCTPNRLNYDLLEKDVINYLKEIGEEFIKHYDIRNLVEESVYIYNKDLLELKNNVDAIQIKIDKEMNTISSLYNDKLEGHISLEIFKKLSQDHENNLQILNKEKEKLKSKYNNLSNERAEMDFTRCRDLVEKYVSMKEPSRTLIKRLIDSIVVYDYGDKKEVKINLKFKVLSYLASTIKV

SEQ ID NO: 590 - protein, 583 aa, synthetic construct
MKTVRCAIYTRKSSEEGLGQEFNSLDAQREACAAYIASQKHEGWVLVPEHYDDGGISGGTLERQGLKRLLKDIDAGAVDQIVVYKIDRLTRSLADFAKLVEHLDKANASFVSVTQSFNTATSMGRLTLNVLLSFAQFEREVTAERIRDKIAASKRKGLWMGGQVPLGYEPDGRSLKIVEEEAETVRHIYKLYLELGSIYSVRQAANDLGLRTKARPRLGAKKYRKGEEHEASGRDISRHYSRKSKGQGSDLAASVIGPAPFGVTNIHYILTNPVYAGRIRHRAQTHDGNHPAIIEPAVWDAVQDKLKEFAARERGVSHSAKYSLLAGKLYDDTGDYFTPSHAQKKGVRFRYYVSNRMISKKQTDKSTIDRGWRLPAPMLEGQLAEAIVRHLSERLPIDLCFTRAIVEIERAQHRLQALATDTEEHLPAILKCLDHATIKQGNVDLVLIDQCVAELTGIAVTWINPAALTFSASFQHRKRGVETKLIIGASPNKSRDEVLTRNIAKAMHYYDAVKQGQSFDEIAKSESLSTRRVMQIIDLAFLAPTIVQSIVAGDQPLALTTKWLSKNTMPSNWVAQREIVAAL

SEQ ID NO: 591 - protein, 570 aa, synthetic construct
MSGNVYSYMRWSTDRQSDGSTEARLRAAQEAFCKHYDLTLVEEITDPGMTSFRGKNAHEGKLRDFINRAKRGEIPPGSLLLFENADRMSRMQLAHAVPLFFEILGAGLRIGIADRLQVYTPGTLDLGGLMTILVDMERANAESKRKSDFGRAGWAKAHVRMEAGDVTTDKVAQWLEVERIDGERRFKVKEGIAEQIRALFTASLQYGVAESCRRVNEQFGSGWKIHQVQYLLKNRRLIGEHTITNYSEQAGKNMPSDRVLTDYYPVVVDKNLFAEVQAVINKRKPFAGKQDASNLNIYRGLVKCAACGGSVRFMFKTGKEYFHCTASMSNSCTGPGIRSIRGEHLRRLLFKFEHWTNLRTYFMQSSEDLKTLRRERDALLALIEKIATRTSQTQQRLMDEDDSDRQSVLLDMLTKAKGDDKDARAKLAATETQLSELEDAFTIAGLDLGNRVEWMLNDRSEAAALERARINRYLSNIFETLVIDFEGKTLSTAVKLALKGKVTEFKATISSPPDKRFNVVKGPVRIAGKSRRVLSTMPDAFTPEELETLKGVQWKAPLPLLSPVMKKPLR

SEQ ID NO: 592 - protein, 624 aa, synthetic construct
MTDFDARPVAYSYIRMSSKRQIKGDSLRRQLDLSRQYADRHNLKLDEETTFADKGVSAWTGANLTEGQFGQFLAAAKEGRIKPGSYLLVESLDRLSRQQVRTALVPFMELINGGIVIVTLNDNQVYSKATVDANFTQLIISLTVMARAHEESETKSKRLKAVAENRRNNAAKGIGRFHPMAHGWIDPVKVGHEKWEFRLNSHSVAVERIFQLSESGIGQVTIAKLLNREGIPTFRGKGQWYQANVGRIIRDEACIGTYQPTHVVEGERRPFGEPIKNYYPAAVSEELFWRVQRGLRISFGRGRHKGNRITNLFSGQITCQHCGSSLRLRTGGKHFYLYCDNFSRTGTCEKSSGLYRYDVLEEAIFEHLTILDPDIDRGGAQDQNREQILRDIALTEQSAKKASRQYDNLMAFIEMADDDEDRKNVMARLKPVRQEREQATARLRELNEDLAALDGRQKEMSTAVERMNAERKKWSSADADLVYESRARVARLLKRFISTMSINFEQKTVMVGVAGGLRGYMFDRKGNVIDQYDMSAQINKVGRPVMFAERGLDGRPDFENAIEIRPRGPSLEPFINISGKDHFDDVFERKQIADAVMNDCPSSNDLRLFGLWKNGVSGSVCGLI

SEQ ID NO: 593 - protein, 541 aa, synthetic construct
MNIAIYSRKSVFKEAGDSVQNQIELCDMYIKRNFFNNEEIKIEIFEDDGFSAKNTNRPEFKRMIKKIENGEIDKLICYKLDRISRSVADFSTVLDLLQKNNCDFISISEQFDTSSPIGRAMIYIASIFAQLERESIAERVKDSMMQMAKRGMFLGGKPSLGFNVKRIKYMNEEMREKEASVLVPNLKELELVSTIYKTYLECGSVTGLEKILFDNGIKNRNNSYYKTSVLVDILRNPVYVKSNNKVHTYLCDMGMQVCGSPNGNGYLIYNKSNVNGKKKDKSEWICAISKNKGYIEPQLWLEVQKLLDKNKDKKIKRLGTGNNVSLLAGLLKCKVCGANMLPRANGGQYKQTYYICTNKKKRGEEKCTCKNIRVDYVDNAVLDSIKIYSKEVLSKSLDSYIKDNINNNSDDYIKSNIEDQIKEKEIFMNSLIEKLAVSTNERVTGILMDQIDNADTEIRKLKIKLEDNLNEEKENKSIIENIRYFVNNLSSFSKNIEIIDSIQFKRECLSKIIDKVVWDSENFKAIVSYSIDIENNESKKK

SEQ ID NO: 594 - protein, 475 aa, synthetic construct
MTTCAVYLRISKDKGLGTDDEGLAVDRQRKDIHKLLKSKGWNVGTEYLDNDVSASGKVKRPAYERMLADFEAGSIDAIAAWDLDRLWRVPMEFEHLLNLSEKQGLKLATVGGDADLATDSGQLFARIKVAVAQSELTRRSARQKAKFAQDREAGKDHWRKRRPFGLTLEGKLVPEEAEALKDIAEIILSDGTITAGVSLLKERGLKTTFGQEWQRQPLRRTLLNPRIAGFLEHEGEIVKAQWEAVLERDTWEAVVAKLNTKNRPKPKTTKHEYMLSGLLTCGECGDKCYGRQTKRKRKSGVTKIGYIYRCNNLCTSKELKKTDDLVILRTLEAVLTTDHQEIQQDKGTLQSLREARAHELKRWADWLEQAAEQDLRPSEIKPHRAKHESKLRDIENQIAQLEKVTLVRLPTLDEALESTADDQGEIVRVFNWDALSLEKRRHLVSLMWDSVTLKRTGRGARWSDDNIVFVERKAV

SEQ ID NO: 595 - protein, 479 aa, synthetic construct
MARPTRVGIYVRISKDRKGQELGIQRQEKACRELCERMGWGVLKVYPENDTSASTTSKRRRPTYTEMLRDAREGLIDGIVVYSIDRLTRRIAELTHFLEEQKEHGFAFATTEGEDTATANGRMILTIKGAVAQQETERMSERVNNSLLQRREQGKPHAGGSRLFGFKEGSNLQEVEPGEVELIRLGYQILLDRGTPGDVARAWNERGARTPEAGTAWDIQKVKRVYRSERIGGIVSYKGQDIGDSVYPHPLTREEWENVQTILDSRATPARKGAGKRKHLYSGFLKCGHCGSTMRIQWATIQGRTFRRTACHSSQVGANGERGCGKVIRRLDWIEARINEVVEAALAKRRPQAQAAPSEDLSGEIKILEERIRALRNRWKDGGMEDEDYFDSLTHLRSDLQTLRTREAASVVRETRTETDALAVWKDEDMQNLERRRAIVASVIDHVEVFSVGRGRKKPPELDSIRIWPVGAKPDGSKG

SEQ ID NO: 596 - protein, 576 aa, synthetic construct
MRFYKVREEISKGKNISELPLRVTFYARVSTESDEQLNSLDNQISFFEKFIKLNKNWTYVNGYIDEGISGSTVKRRKKFLQMIDDAKSGYFDLIVTKEVSRFSRNLSDSIKYTQELLANDVGVYFQSNGINTYEPNSEFILNMMGSVAQEEVKRLSSRVKWGHKEAIKKGRVLGSSTITGYKKDDAKLVIVEEEAKKIRKIFELYASGKYGFYKLAMELHRQGINNYKGNIYDKDTLKRIIQNPKYKGFYRGHTTETIDYRTKQRVYIPVEDQVIYKDERVPAIVSEELWNRANEILDSRSTLMKASNGNAKRAERKYCYTTKIFCSEHNVSYQRMSSKRKQTKPRWACGNYVKYRLDACKSPIIAEMDLNNIFTIIMEQVFDNKSKIIKEMLNYYSNLKIDNNYQFEISKLKNEIKTIEAKKEKVLELNIDGSINNLEFKKRNDRYNEDISSLNIRIEKTEQERKLMSNSFGNIKVIEDAIKKQIDYKNNVSEFVDNFLEEIIVYKEDNDRHKLRLKIYLNLLKKSIPTEKGARHIDDDKSLPIFSKEVETLDLGRSDFQRNSFKINIYLSCDID

SEQ ID NO: 597 - protein, 441 aa, synthetic construct
MLIESVDRFSRKQGYDAIDEFTFLIKRNIDIVEVETGQIYSYKLDHKLSALSTSIERAHQESKRKARISKKSLNRRKEESLATGVALNNNTPDWLSLSQDKKTYEIDAQKVQTITSIFEWYRDGYGVTEIVNRLNSEGNRYNGRGWNTVTVYNKLRDRRLNGYLIGKYKTIPKKDSESTTDTEKRILENIKIKKEANDNAQRIYPVVIDDELFTKIQSMMDRNVSSKKQRSTTTKQRNLFNGLTKCHECGSPMIVQSMSNGGQYLRCYRQRTKDEKCNSKMLRYCESEKVLLGHIKNLNLDEIYSDRKHAQSLDVLKRQLSDVNEKIVLLNDKVKSASDEDELFAIMEFKRKRILEKDELNQKISSLENESEIVRLNYNYDIDKLTDQDNTVLRRKANEHIAKVISAIKCRRIDSSYIGAYYLYDITYHRDILKHILITDY

SEQ ID NO: 598 - protein, 500 aa, synthetic construct
MKQIEQKEYVAIYVRKSRDDKGDIQETLHNQKMSLINLADNKGYDYDLYQEVESSVDFHRPELNNMINNIKKSKYSRILVTHIDRLSRDERDSAELKEIFISYDILIETPDNIIDLTDENQELMYGFNAVLSAYEYRRIRQRLLKGKLDAVAIGNRWVGSVPPLGYDWDKNKKQLVVNKESSTVKKMIELALAGYSSNQIAFKLNDLGYRTKTGKPFKSDRILRTLKNRVYLGEAKFNYKRMKKSAIAIGCHEPLITEEQYNLIQNLIQSRKSKGSLASLGIKSCLNKILVCGVCGKGLTIQKNKRVSKVDERDLSFYHIRPCLHKVDVNVKCPNRGMKIKKVEDAVQQSLKMYKQELQQTLKQLLDKDITVIEHQIKNNIDSLKKDLVLQQNKNQKLLDLYLASSELTLKNYQEKKAEIDHIIENLEKEITTNNNKLSKINISTQINHIENIISMLDNFRNLELEEQNATLKLIITKVVFTKTAETNFEPKIDIHWREL

SEQ ID NO: 599 - protein, 624 aa, synthetic construct
MIKTFIYSRVSSQEQLSGGGLDRQETDVREYVTRNGLDQYEIVAMVDRGISGYDGSNMRDGELGKWYKDAITGMYWGSHLVLEAIDRFSRRDPMLAMEDFTVLVNKGGIKVHIVKFNTFINGDNLPMLSMMMNLAHSESKQKSDRISKGWQRRRRMALDNGTAITARTPYWIDVRDNEYRLNNSSIAVVEAFAMYKQGLSCGLIAKKLNELKHYFPYMWTKTAVQHIVDGLNTSGIIDAPRAIKTIKAFYKSGFSVEDIAKKMNAEFQFMKEWNAPAVHKLLQNKSVTGLVEIQKRKLIQEFDSDGKPLELRTKSEGEKYFESIYPQIISIDDFELIQKLLESNRKVDTKTGKGQTTGGTVTQNEDGELVKQFILSSLCRCYKCGGAMFNNIVRSKRKNGKVDTYSYLRCLNERDAHCDVKALNYPVIERAIIEHVKGLNFDTMFKGTNNSELELLKTREVELLRDIATYEDAIAARKAAGKNTSPVLVTSLVDAQDDLEALQKKIRAISGVTVNAGELTSLNESVFDVAEYELRNMVELELQKIIKRITFNCTEKNIYFITIQYNTGTVLQHGLKVDKKKGVIETYELHEGNKGYVSNGEVITPALIEAAESKNIGIFEGKVM

SEQ ID NO: 600 - protein, 485 aa, synthetic construct
MYKIGIYMRLSKEDYEKNEESNSIKNQRQLILSYIDKNFSDFCVDNKIEYIDDGYSGMNTNRPAFERLMEDIRDLNTNCIIVKDLSRFSRDYIETGNYLENIFPFLGVRFISINDGFDSKDNCNGTIEIDTQFKSLLYDYYSKELSEKIKLTLNSLKSKGKIINEAPFGYVKDPKNKYKIIKDDISAKVVRKAFDMILEGHSQGSIAKNFNKEKYLTGSERKRVLRGESLENYKKILWTTGQISRILRNESYTGTFLYNKTYKTPIRKSIPRPKEEWGRIENAFEPIIFKEEFNKVQDILNQRSFPAHNDARDVDSPLRLKVRCGVCGHKMKFDYRAVVGKNEKKYDCRFRCRVCSLNSKSNSISSNTVESYVLESLKRRGVKLEERKTIKSKKIDQGKVNALKFEIQKNYELYLDSKLTREEFLEIKNNINEQLSSLKKESETKDKLENITMCNTDLKLTNEIVESNIKEIIVDASKNIEVIYK

SEQ ID NO: 601 - protein, 476 aa, synthetic construct
MRDPRKLKGKSMSKNAEAAVGERAALIPAAQYLRASSEVQKYSSFHQRASIAEFSKREGYDIVRTYVDEGKSGVSTKGRKGLSDMLADIVAGRAEYRTILVLDVSRWGRYQDPDEAAHYEFLCRSSGISVRYVAEAFDENPTGAILKQLKRVMAGEYSRELSERIRRAKRINRALGLVQGGSCPYGVARQELLPDGSLGKVLRRGERKSHPEYRLRYVHGDEREIGVVRKIFDLYLVRKKLPAQIARILQRDGETWTSGEPITFQHVRRVLTCELLTGVLRFGKEARTFGGPRTIQPRSTWGEVRVMEPIVPPRTYAAAQRRRAWLADNRRRSEERMLSDLRRVRDRVGRLSTSVVDEAPECCNASYYDKRFGTLGRAMALVGEKPRLNRLGSVLGRKIGEEQLLAVLRRIEHERGSVSTSLLIKTPDAPSYMTYIKRFGSVAAACEAAGARYSRLRPGPAALVPVQGDAAINRRS

SEQ ID NO: 602 - protein, 550 aa, synthetic construct
MEGTVTPDIPATFRGSPTDEDGEPWLGYIRVSTWKEEKISPELQKTAVEAWAARTGKRIIGWIEDLDATGRNFKRKIVNGIARVERREAIGIACWKYSRFGRTRDGVAVNLKRLEDAGGQLASATEEVDARTATGRLQRGILFEFAAYESDVRGEQWRETHDHRRDKLHLPATGRQRFGYIWHPRRLPDPERPGYWLLQEERYEANQHTGPVMADRYRQFIDGDAFYALVGELNTGGHRTTRGGLWTEQTLIRYMDSGFCAGLLRVHNPKCNTCNPEKRGHCPNTIFIPGAQEELISAEIWQTYLEHRAERRATPPRARRGTYEGSGLMRHGSCRGTLVPNNAQRLVDGQMAKIRGYAYRCGRRATTGPLGCEGVWATRHEVEGEVFKWLKREAASGIDAAPSTPEDLAAPRNQRAAAARDRARLEAEADKLSTALTNLRIDRAANPDDYKPGEYEAARDKIRRKQEATTAAMERLAVVESTPHRSDYEQLIIGTAAEWRTLEARERNGMLRQLARRVVVDRQDGNITVTVHPVWEPDPWEVEQSDVRAG

SEQ ID NO: 603 - protein, 484 aa, synthetic construct
MIKVAIYSRKSVLTDKGESIENQIKIIKSYFSNKSVKFEIFEDEGFSGKNTNRPSFNRMMKMVEMKKFDIVAVYKLDRIARNVIDFIKIYEKFEKNEVKFLSVTEQFDTSTPLGRMMMYIIANFAEIERENLRSRVIDNKKELAKLGQWSGGNTPVGYKSTKEEIAGKKVPYLRIDESKKHIPLSAFKWLLEGYSLEQISKKLSDDLNYKLSRVNVKKLLTNPVYTEYNEQTIEYFSSLGLQIFNTVKGSGLIRNSFKDETIIATSKHPPLISSEDFIKSQILIKEKSMDPKPRISTKTFLAQTVYCGYCHSSYRIDVVHGKNIVRKQCKCGRSISVDELECLVINYLKSVVSGNIQIKSVDNSELLSKKKAISKKIKKQNAILNGLIEKLALAPTNVSEIIMDKINSISLELEDLKNKSTDIDMQINDSFKAKNIITIQSLWENFNKCKSIEEQQRIFKIMLDKILWFPKPNSRKGGAIEIIF

SEQ ID NO: 604 - protein, 534 aa, synthetic construct
MPYAVGYARFSSIKQGSGSSLERQQAMIGKWIGENPEYTIYPKSFEDLGRSASKGDHLKHGLGKLLQAIELKEIGKGDVILVEAIDRIGRLTETKMFSLINEIIEAGVQIITLQDGTVYGPIIKTDQVWLLLGKIQQAYLYSKDLGGRIKESYTIRAKMAKKGIVPKRRTPIWLNTDGTLKDNIAVAMKTAFEDALSGLGERRILKRLKEKDSAFEKSHPASVRKWLTNKTAIGFWRETLIYPPIVSQDLFYQVQKRFEETYVPASAPTKHFLSGLVKCGDCGSSFQVKVNKSSPNTMHCSARSIHGIERCKNGTSFPVPVLLHVCHDTATRAMENALQHIELSQAKKKTIILDGQLNDIAKKISNLIGSLEKYGAVPEIDAQITALITERKKLENEKLYLAIDDPDNTTSYEDAWDYQYELIEDDPMRLNALLQTVNYQLKCHANRSILANTTGNQFSKCTYLNYDRKKQAYRIQANGNIHHIANRDGTLTKRRLELFKEMLQAQRDGTTAYKEIKTSPVELEILEFLAEIDD

SEQ ID NO: 605 - protein, 487 aa, synthetic construct
MTAFSYIRFSTKDQAQGDSYQRQIASSRDWCKQRGIELSGKGYADLGISAFTEKTRASLADMLEAIQLGTIKAGDWIILENLDRLSRQGIDKTQEIIKSILRHGVKIVSLQDGLELDSGSLNDLVAVIRIALSADLAHKESLKKSERVSAAKASQRELAKQGKAIGKRLPYWLERDGYSYQFNDGVDAVRLMIQLRTDGLGFHKIAMALNASEFKPRWADHWSDTTIRNILSSPALYGRYQFRDGDGVDDYYPALVSYAEFKAFQSTFTASAGGQEHHNHLFGLVRCGACGGAMSKKVSKRKVAGEWKHYKGWICTKTLSGACAQKSPMMDLDTLVIKAVKRLKVSDSKKVSREANQLDQEIDTKKARLYEITQALVSGNGSVSVLSAAASTLERELKDLLVQRKDSVSTSQSEIQTLYDLRDDPKLFNVALRRVVDRITVSHKGSSTWHVVIHQRNGHLISVAAFRKSQRSPWQYLFGNTAEIAEL

SEQ ID NO: 606 - protein, 561 aa, synthetic construct
MKRKVAIYTRVSTKEQLKQGYSIQQQADLLIKKAKQIFPEDEYEIYSDEGISGKNIEARPGMKRLLEDIENRQIKVVMSWKLNRLSRSNRDIQNIIYEFRRGGAYYISISENIDTSTQNGEMMIGAFGLVAQIERETIVSNVKMGMNAKAKQGEAITGRVLGYVLKPNPLTGKNELVIDEFEANIVRQIFDLYLNQNKGLKAIANYLNKQGYRTINKKPFSVYGVKYILNNPVYKGYVRFNNYQNWAVERRSGKNDKSKVILVQGKHKAIIDEEIFDKTHEKLAAKSFKPGRPIGGDFWLRGLIKCPECGNNMVCRRSYYNTKKSNERTIKRYYICSLFNRSGSAACHSNSIRAEVVERVVYFHLSRILSQSHVVQTIATQVIDAMEKKRADQIPMSIDTKSLENQKNKLQKGKERLIDLYLDEEIDKKTMQTKQDKLNLQLEKIDEQLKQAEIINELSQNIVIPNYKKIKGLLYCMLYRFTGYMRKANPEAKNKLMHMLIDSIEITTDKQVKLVKYKIDESLLPQSIKKDCGNFFMPKFKFVINVTKKNRIENLSLLPLL

SEQ ID NO: 607 - protein, 527 aa, synthetic construct
MTLTQSPPAAESTTVADLRGRIAEHNAALPTSATVVDLYARLSQNPDGKLEKIETQLADAFAVAVRRAWRVGELLIDNSLSAWNPRVRRPGWEALLTRLESGASGGVVAYHWDRMMRRPQDLGRLLDIIRDRRLEIATAHGSRDLQDPNDQFIAWVEVAHAQRSSTDTSRRLRRRFQAMREDGQVRGGPRWFGFPGADRSLPKDSDGHRPPVQAELVQRERDAIRAASQGIATGTMTLADIAAQWNAEGLRTATGGTWDGVNVRQVLSRPRNAGLINHEGAIVGRVRDEKPIVDEDTWNRVQAVFASRRRGRTPNPRNYIASGLIHCGQCGHVLTGRPRSRRRPDGTLVNEYYCHKLRGGCGRLAVEARNVETILRAFAIRRLSDARFATQIAAATAQANERAEEVAAELESARQVEDALAEKLGRGELSLSAWEGGHKHAHARVLALEAERDELAAQAAQAGPGVAVAGAEELAADWDADEATGGTLRRTMLAQALRGRRVVIEPRPHQNGKPVFDPTRVQIGLAE

SEQ ID NO: 608 - protein, 474 aa, synthetic construct
MKIAVAYVRVSTNKQDIRGSKLGQEQEIKNYASKEGYNIVAFFDDTEHGDIANRVGLDDLKKYLRMNDSVKYVIVYHSDRFTRGFQNGIQDLFFLDGLGIKLVSVMEGIQNIEGNYDSLPTIVRMLGAQVEKDKMVQKVTTAMYQYAETARYLGGSIFPWFSVEKGYIDGKRCKIVVQNKDTWDFYRRFFLTMIQSKSIKSTAEKFGLNLNTVQSWLVVPELMGKRSYGKKGKIDKLHNKGRRQDYLITEKIVFPALLTKEEYDKLLYLRHRHRIQVREDIKIYLYSQVLYCGCGGKFEGNFIRKIGKEGKGTLYYRCSKCGKRINAKKLERDLIDRICNDSRLQMLNEVEFRLADLFDEKTEYEKQINILREKEKRVIHLVTDGITSMDVVEAELRALKKQRDHFHSLINKIDKTIQEEAKKEITEDNINMLKELLTLNLPDDDFRISLKEIINLIIRRITIGNTDNKIYITF

SEQ ID NO: 609 - protein, 499 aa, synthetic construct
MEFVAIYMRLSRDSTQNGIEESLENHRLALTRICKTNGWKHDIYEEIASGVSPEREQLNLLLSRLNDYTAILTMDVDRIGRDPEHNEKVLKMLILNGIKIITPSGEYDFANENSQMLYRMQSMLSSFEYSAIRKRLGRGKFLEASKGNWVMNNIPLGYLKNPETKRLEIDENESKIIRYIFEKTIEGYSVNKISQDLDAFGWRSKKGKVLSTAHISQMRRNPLYYGVVRYERKNELGRVLEDCWVEDAHPGIVTKEEFLRCQELIKNNNNKKFKTHGKVKHILQGLIYCAKCGRKRYICVDRKDVPYIKADGAKIENVRCSDAGMALKPITDAVIEDVKKLKPELEEEIIKLKKRDITKSEKEISNKLIETESNKDKLNKKKKNLVEMRMNGEITKDEFLQFKDGLEEQIRHTDDMIQLLQIKLNNLRNTEDEVKKLEKVIWTIDNLDNLSVEKINSFLRSIIKKVLFSRNIESNPNTTKRDDVEPTVDIEWIEGIPIL

SEQ ID NO: 610 - protein, 538 aa, synthetic construct
MKVVVMDVLMKAYSYKRISSKKQIEGGGIQRQTQLAEDYCNKYELQLSDLNFEDLGVSGYHSRNTEEDAALGRFIRGVEEGSIPTPCYLLVESLDRLSRARVQTALRQLLHIAENDVVIVTLMDEKKFDKSSDAMDIMYSLMIIQRAWEESEIKSQRVSAYWEQKRQDPFSKKKGGSRPFWILINEEGTEFSVNEPKADTVRRIFELKLTGMGTMAIARRMAEEGHKSGFDKQWSGGTIANVLRSRAVIGDYLHRDGSVADYYPPIVDKDTFNKVQVMLIGNNKPKGSTSSHRNIVKDIATCRCGDTFSLSTKKTPTGKNKGKKVAYYRCNNVICNNLYNDRTFEIWLKQYFCAPPFHNSWVDTSDHEDQRQRLITDKKLELNASQEALQAILSVPDGLSNPLILKKVSELSEQQRDLEEGLEELEKAQVVSNRQLSYQETRELIDTAFEDSNEPDNIKARTQLRQLLNACFSKIVFWREDGYFYLDVKSGDQEYNYKSVFIRRKILDPLWTIPSDKPLQEVEDKQAVIDQFRYNPDA

SEQ ID NO: 611 - protein, 490 aa, synthetic construct
MKASIYARLSQDKRKGSAEEGSSVQAQVEACKAFIEAKGWTLDKTYVDNDISATSGAVRPQFEQMLKDSPANVVAFKSDRISRDVMDTLRLKASGITGWLCDGGKLDFSSSDSTMLTLFRSVIDSTEQTKKSERQRLATLRDAKAGKYRGSIRPFGQERDGTWIEPEASAVREATEKLISGEWTFFKVATEWNTRGLLTPQTGKQGGREWTSGTVSQYFKRPRLKGYQEYEGTLYKLADWKPLLSEEEFEHIQLIRDSRKTGVRGKQGYRHKPHLLSGWIECGICGRKLNTAYRGKPKNTRAYSCPTPRHVTRAAEHIEKLLVSRVLVPLFAPSAERVLSPTGASEASKLRREQLALVKEHQEWMQEAIDAELRPAVLAQKEAKHTEKLTELKERIAELEADNVFAGITWIDHARNIMEFEPIAWEHWNALSLERQRVLIQALYTSVKVMPQGVGTGTAFKPELIKTEISPLLQELEEVAMEWLLIASFR

SEQ ID NO: 612 - protein, 541 aa, synthetic construct
MKNKYLLPQVYLYMRFSKKRQEDGDSLRRQMKLAEETSKKHNIPINEDLIMRDRGLSAFKAEHIKRGALGKFIAAIEDGLIAEGSILIVESMDRLSRDTPLAAQIQFNILMSKGITVITANDGLTYNEATLATESSKLFLIMGSMQRAHDESKHKHIRSLEAIEAKIQAFKDGAKPKSVGGDPHWIKTQDGYLQLDQERADIVKLIVDMYLKEHRGLNLIARELTKRGYSTPSGKGKAWGATTIRKILDNKALYGHKKFSLTYLKNGRYIAEPPYELDDYYPPIITKEEYDIIQVRKGNTSGSRESYGEDENVYLLSAYGKGKSVCAHCGKNTHTQYQKQKNRKNEYTGRNVQRLHCGSHKESSDCQPSFICQELEMAFIRAICTHINPQFLEKENAGKIDEERLRKDISILDVKIDVLLKSIDELDSKDLIMKIKEKIRAFDLEKKELSGLLNQSYDHQTGVEDFHKMRELAEKCIDIKNSNERRTFKKILLQSIDKITINFEDKSLTAQFKNGNNFSLGKDGQGIYQTVTFYKRRPKNH

SEQ ID NO: 613 - protein, 523 aa, synthetic construct
MEYLAMYLRLSIEDEGDKDESNSISNQRKQIYEHIHHDSELSRYEVVEFCDDGYSGTNMERPGMQKMLKEVKANNIRCIIVKDMSRFSRDYIEMGTYLNQIFPFMNIRFISINDHYDSREHHGNTIEIDTAFQTLLYDLYSKDVSVKVKASFENKCANGEYVFGQVPFGYEKSKEVKNAVVVNEKEATIVHYIFSLAMQGKSSIQIARQLHEENVPTIMQMRKPNKEYTDGKVHSWSENSVRRMLNNRFYLGEMAYGKSVRKSVGSKNSISVPMEDWKVIKEHHEALISEEIFEQVSLFRPEHSTKRNREKHPLTGKLYCGGCGYSLNYKPLRGKNRNRRFECRKHALLKIPECCTYMSADLLEETVLLMLNKELMLRGDAVKQNQKLTSFQKSGIASLKRKLENYQSEMKQARAKKDNLYEQYALSGLTKEAYQSDANELAEQITLLSVKIEETAGKLAVMESEYQKAEEDMKQIIRYSHIEKLTQDVVDTFISKVYAYKDKRVEIEWNFSVDRGCRQAKAT

SEQ ID NO: 614 - protein, 498 aa, synthetic construct
MSDGILLAREYRRLSDKKGGTSLEDQGEDNKAAADENDWDLGEPYIDDGLSASRYARKRRDDFDQLVADLESGPTGRESRFGADILMLWESSRGSRRVGEWVSFIELCETKRVRIWVTTHERLYDPANGRDRKALIDDAVDSEYESYKTHRRVSRTAPREARRGRPHGKAPYGLMPVYDVATGKLITWTADPDRAHVIQELFERLEEGHSFAAIERAFLLAGYLNKSGRPFTHGHLRRLAVTHAYAGLRYYKGTVYEGTWDGIVPRPRFWNVYRLVTDSSRITTSRTAAAHALTAGLWCGRCDTLLSFRMEKERKPVYRCKQCGIKIQRAPVDELIIGKPKDLGILLAYLARDDIYDVLRAPGSDDAAVREVRDDLARLRAERDELRNATGATLAEVRLLANSLQVKEAEVSALEARERELTVPASVLSIVQPGLDVWQSWRDAPIGARRATVRLIMSPRYLGRACILPSPRPGRNQVVAERLEWRHTNVPSPVPRWT

SEQ ID NO: 615 - protein, 471 aa, synthetic construct
MTIRAALYLRQSTHREESISLELQEAACRRHCEERGYQVVMVESDPGISGRTFNRPAVKRVMEAVEAREVDAVILWKWSRLSRSRRDWAIAADRVDVAGGRIESATEDIDVSTSHGRLARGMMVEFAAFESERIGDQWKEAHQRRVSMGLPANGKPRFGYRRLDEGFEPDPETGPVLADMYRRYISGESFYALVKTLNDNSIDTVPGYGTSGGAWSQRSLQRVLDSGFGAGLIRSHEEYFPGAHEPIIDEDEWKDYRAARDRRRVHRGSERSTYLLSGMVRCHCGSSMVAGQFGWKRVPKFRCKAAAEKRAHDGGYVSAHVLDDEVKAWLRGIVSDLSEVATAEAGLQSKRSQASSNLSKLGSTLTRTEQAITRLTVSYAEGILDLEAYRSATKELEQKRDGLMSTINSAESERRAIPVSLEVVQSLLDDWDIIGIEQRREMLRGLVRHVVVKPQRPKSNVTVVPIWDAGV

SEQ ID NO: 616 - protein, 530 aa, synthetic construct
MRKVYSYMRFSRPEQAKGTSIERQSHFAEQYALEHGFELDKSLTMMDKGLSAFHGIHKKKGAFGQFLAAVSAGKVKSGSVLVVESLDRLSREDPLIAQSALSDLILSGITVVTAADNQVYSREEIQQNPFKLIMSLVVMIRANEESETKQRRSNAFLKSALNQYQTNGKVRRLGADPSWLDFNKDDDTYSFNERIEVIRQILGLYNQGFGSLKIARQLTEESILTLSGKRNAWGQTTVANIVKSHALYGMKRINVQGVDYDLEDFYPALITKSKWLALQQHRTKRSKSMHGRGETVHLITGHGKGFTTCGYCGGGLGAQTQKQYKRSGEYSKTVTRLHCLTHKETSSCCSSVFLEPIENAVLFAACIGVEPQSLVPTANNVNYSALIDEIENKVKHIVEQVTAGAPWDLFKDAHDRLTLEKQKLIKERDSQKPDVNQSDVQKWVEKLIELADKARADNKEARLKCRTLISSVCKSIVIQLRGHDLKSEPLITITFVTDEQFEFKVGKDGAVRFVDNDMAVNRRLKPLLTE

SEQ ID NO: 617 - protein, 611 aa, synthetic construct
MYKRHKWLINMNTQQRKAYSYLRFSTPDQLKGDSYRRQTDLSQKYARENGLELDDSLTFEDLGVSAYRGRNAREGSLGLFIGAVEEGQVLPGSYLLVESLDRLSRDTVMEAFKLFSQIIDLGITIVTLSDGRSYSKDSLNESFTDIIISLTMMARAHDESKTKSERLRAAWSHKRKTAGTKKLTALAPSWLQLNEARDGFDVLEDRAETVKMIFRMAGDGYGANSIVKYLNTHDVPTFGRSKEWHKSTINKILSSESVIGRYQPHSYTVDEATRKRTRTPTGDPIDNYYPAIIDEDEFLRVKAEISARTPKTGRKGRRFSNLFQGLARCGNCGASMGYVNKGPKPKGGTYLVCSRAQRGATDCEYAAVPYQRVEHAVLHTIHELDLDELLPSIESETASQKKALRMNLETHQARLEEVEGQIDNLLELAATTKSPSLATKLEGLEAEKGGLHQKILASLEDLEALSRAAREFEDQQREVQKAYQQWLEINEAGSDADAYALRLKVNRALKKLLETIHVSVIKQPDITKEEALAGISSGGPRPESLENSDLDTLATALSSPRTVLVLSFNHLDSPKVRTVSLLHSGRALVTTGEWKEAGGELGQFRMSEIDA

SEQ ID NO: 618 - protein, 542 aa, synthetic construct
MHNLQEVQSIMTVKNPLPRAFSDVFRDDETINVYSYIRFSSKAQALGFGEVRQLEQLNGFFEQYPQARQVEKYEDLGVSAFRGKNLKSGQLAKFVERIKSKEILPNALLLVESFDRISRMGGYDALELVVSIIQADCAIYTLFDNRLYSKRKKDSNVDISLIQNILERSNDESRAKSERISDAKARNLTKGENGGIITKRCPFWISFVDDKFVLNEHAKAVKRMTELCFDFGFQSIAKELNKENHPKKYTDSIVGKVLHKHAIYGSFLAMKNDENGNRTIVNKEIKNYYPAVIGESEFHRISEKLKERQDPKLAGRKSEEFRNILRGLVFCKCGSTFRYHAQKNYYVDLVCHASTVGQCKYAMPGKGIRHRYARIEEIFLAYQSLIPFHKIIVKNDDIKALEKEHQEVLGQIIIKEKALANNFSILEKASDSAQKYITNRIDEVSQELDKLKVDEHKLNLKISSLHLATKPDLNVMEIYRLLITEKGRIRINNFLHSQKIKLIITPVKKKFFALDIYHNNKHIDTIDVTPDGYLAHHKPHLK

SEQ ID NO: 619 - protein, 519 aa, synthetic construct
MRIALYVRVSTEEQESSIINQKEYIKSLYPDDEVFVYQDFGISGTKISNRNGFIRMMKDAGLKQHFITKKKFVFVADETREPLFDKIVTKSVTRFARNTDVLSIWKELSQKGVTVFFQDINKDTASTEDSLILNLLLTLSQEESKNISERTKFGNRATAKANKIRNNSLYGYIFDKETNSLIIKEDEAVVVRKMFDLCIQGYGYVKISQILAEEGIYNPKGKPFAMSTIKNMIHNKKYCGYNVRNQWESRNLFSENHSHCRTKKENWIIQKNDKIEPIISEETWNLAQEQIKLRLLHQNTGGTVERRDTSDKIICNCCGKNFYICHSRKIGSGINSYPYYICSTKKKQGKNVCDNDNVQVKKVDAFIDGLAKNYYKNIRLSNKAKLIKLQGELKKAKNRSVTEINNECEAIKSENMYHEQKLSKLIDNFLDCSDVMKAVIDKKINDLELTIKNNNNKILELERSRTNIDADKMSIEKKIKELKKELSKIDTIELTREELMDKIRYIKVDKGNKFIVEYV

SEQ ID NO: 620 - protein, 570 aa, synthetic construct
MVTAYSYVRFSTPDQAYGDSETRQLKLAIKYCKDNNLTLSDRTFKDLGISGYSGKVRPSLFEMFDCIESGEIKRGDYLLIETFDRLSRRGFDDTHQLIRQIVKAGVIVVSVQDNLVINEESLNDSMTIVRLAISADLAHKESLRKSVRISESKTSLKQKLLEGQKVTISSNVPFWLNIENGVPTADEQQVELVNMIYDLSLDGNGFTKILNVLNSSGIKAPKGGQWGKSTLAKLLSNRAVLGEYQPYKSQSNGSRAIDPDYGVIHGYYPQIITEDKFIQVQVAKNKRKTYQSGNKGKEGLFPNLFQQFAKCSTCESSLEIVNKGKTPKGGKYLVCSSAKRKGSCKKNKHFRYSELEKILNSLVMKGVISLESDKAQSKKAVELSKLEHELIKAKQKFEKFLMLDLGDDMDLVRRSSNHHKKVIAGLEKAISNLNYEVHDGISNASFNEAGNLLKLNNNTAENATLRSRFNLALIKKYGICSIGTVGSYTFVEFKNSEDIIFISPNYKWYFPSAYQFTPLPIMVGVKSRLRISQTELKRQAETLLDCISQTNIEGLTLHSNTLKETISNIK

SEQ ID NO: 621 - protein, 597 aa, synthetic construct
MGHADLLTLDQWRGILMSSKQKLYSYVRWSSEKQSTGTSSERQTSRAMRFAEENELEYVEIKDAGVSAFKGKNTTQGKLGVFISEVDKGVIPRDSWLYVENLDRLTREDVLTANELFLRLLRMGLTIVTGMDNRVFTRESVNNNPMDLMASILMFMRAHEESKTKSDRVTSHVLALLERQRKGLPVNIKAIGKHPFWIDDSGSAHEKVKKHPDFWLPAQEAVRLFLEGHGAFYVTDYLNQNYPVPPAFKKTQRREGGWPLQAIKKMRANMALVGTRIFNLSGKEYRLENYYPPLCTLGEFAQLQDIKTNNKRYSGKTSTAINLLGGMKILRCGHCKGTMTAFLQRGQLRYICEYGRSGGNCTAWSLKASIVERCLMPVLITGFLIGAYKTHSDLSLLDKQTNELKEQLKKVQSQQDNVIDAIADLGRTPKLDAKFKALENEEQRVCGKLQQLHQAKSLYASTKDFSENIVDFVAGQCHWMIVSDVHNPKREALRERIRSVINEAIVTKDNRCIRIEFRFPTGETFVFAGSRPGEYEVFLPRKVHDIPPDATEQEINEWERSDYEYNKNFLKLWYEVVNKNLLSHYPAIDGKDFWPKR

SEQ ID NO: 622 - protein, 571 aa, synthetic construct
MSGEIDYSKDWTMYYIRIEVRAAMDTRETIAAYVRVSTKSTDQLTSFEGQRAFFEQEYGDKYRVLIYADRGLSGTSLRRREQFEQMLYDAGLRRKYADTDEWEPDPSREPLFRRILVRNTSRFARNVLVVGILRALRANGVYVHFLDKGIDTKDEDWEFVFNLFMNFDQQESIDKSKKVRAGLKMSAQRGQIYTADRLFGYKYYPGENRLEIIPEEAAIVRELFDLYERGEGIRRILNIFREKGYRTREGREFQKSTISRMLGNEKYAGILVRNKYDSGIVFQKHRTHRLRPREEWVIHEGVIPAIIDREQFERVQAIRDGKVHTGLQRGVHKGRSLYAGKIRCGKCGANYRRNVDNGRFYYNCATKKARGLAACDSPNVNEARLNEIVSEVTAELPGIIERNKTSTLERLAVLREELAASIDQDKSALVAELNKQADDLRQKKTRLLDLYLDGSFDKEMLAEKTTEIDRQLTALTARIAEASRTNDEIMMEIARIDQYIERVRTLKARDYTEEEVREMVRFDVMFNRGEVFVSINALDEVTATRQTLVDALPKYAAAIKATRFGVVKSIR

SEQ ID NO: 623 - protein, 561 aa, synthetic construct
MCKKLVIFYKRVSTQAQVTDRDGLLRQQRAFDEWWSKLPDRGDYDLEEYADEGVSAFSGANVNGGNLGKINQRVFNGEIPRDSILVIHDSSRFSRRDRRETLSDLWRYHALGVSIFSLMENRFINGDDIGTDLITMLGADSNHSYSDRISKFVGAAKAKEQHEVRLQKKGVFRGSVPHWLKRKDGEYQTQPEHFEVSPDASRVIQRIFEMRYNRMSMIAIAATLNSEGVPTITQRDFRRKSNPVGWTPSTIKNLLRNVAVIGTLAESSRKGSVYPAVPDYYPAIVDSALFEAVQLTLTKGKQTSLADGDESNPYAIRIFKSLLICKFCGQKMDVNGARGALSSRGTPFAGSLICRNARNLSCMHGKDGGRTPTVPMRIVENALTEGLFQQLNQTNIRNDITRQIAKKRQQLDTLKNTIDRGAEDLMKDGLPDIMRNAILERMTFAGKHYEELQSELLEMESKQRLQSVDNLGGLDLMTRDGRIAAYNTIVKTISKIVVDTVEQKCDVHLLNGNMITGFSFQPHPLYPEDAETYAKNQMSQLADDEFGLLTGLTGQSSVKLD

SEQ ID NO: 624 - protein, 508 aa, synthetic construct
MFFEEKNTEELIRYEDYPYAVYARVSSEKDSQTTSIQNQIDICHHWIEKNNYEWKDEAIQLDDGISGTILLDRKAMQLILNKAKNHKLKMVVFKSISRLARDLKDALDIKEVLLAHGVRVVTLEEGYDSLYEGKNSMKFEMFSMFAAQYPQTISVSASSALAAKARRGEHSGRVPYGYKKNGKFLEIYEEQAKVIRMIFDLYNNHGYGQKRVVHKLNEELLLGNIPKPQQNERWQLSTVQRILQNPIYCGVFIANRYTQVKIGGRKKFIRNPEEKWTIYKDWAPKIITLEDYEKANNKKHVLKKRRFNPKNELRGLMKCGVCGANMVILFSYRRRKKDGVKVEHNYVKCSAYRRGGKNMCISHPPIQYKDLREIVIEKLKEKGRKLKLNVKSDYEEKKKRRIRETKVQIEAAEKKHKRLLELFLEDQMISKAEFQSKRKEIEDQLEQLNDKLFLLEREEEESIDITNIKIAFSLLKKKDQDLYEAFHALIEKLVIHEDGTVDFHYKFQ

SEQ ID NO: 625 - protein, 537 aa, synthetic construct
MREQQNYRAAIYCRLSSEDGADHESMSIGNQRALLAEYVQKQGWEIVDTYIDDGFSGTNFDRPGFQRMIADIEKGRINLVITKDLSRLGRNYIMCGQYTEIYFPERHVRYIALNDGVDTLNQTSSMDITPFKHILNDMYAKDISTKIKSTLHTKAKRGEYLGALDPYGYLRHPDDKHKLIINEETAPVVRRMFEMCAAGIGSKSIATTLNREGILSPTEYTRFRKHNPERDGEFERRSFWTRTYVQFMLKNEIYVGSMVQGRQYTPSYRSKKREPIPKKDWIVVPNMHEPIVSRELFDEAQKRMGARKKTIKAKDEPDLFAGLFFCEACGTSMVPKVSQQKYFYYTCGRSHAIGNLACSAHYINRDTFHQAVLEDIRRNARLFSEDTEKAAQKLMELKCADQQKQTAAMKRDLASAKKRLADLDVKLKRTYEDNMSGKLPDHIFAMFIADYDTERETLKAKVAELEKALEKVRDAKADIDRFAALIQKYTSFEKLDRFMLHELIDRITIYETPGMGRCRKGKEKRITIYYKFVGTIQ

SEQ ID NO: 626 - protein, 547 aa, synthetic construct
MAKQTIYNAGIYVRLSQEDMRAGESLSIENQKLILTKYVKEQGWNLVDTYVDDGWSGTDFDRPAVQRLLSDAQSGKINLIICKDLSRFGRNYIEVGRYVDYIFPSYNIRFIALNDNVDTASKDTSALDMMPIVNLFNEWHAASTSKKIKTVIEANAKAGKYRTTCAPFGYTKGDDPNHLPVIDPDAAPIVRNIFEMRASGISPHHIADKLNEDGVPIPSDYYYAKLGKPNPRRTRHMWSPETVRQILHNYTYLGHLVQLRTRTVSYKNHKVIKNDEEDMIVVKNTHEPIVSQELWDRVREMEQSVSQGKRNSDGYVANLSGLIYCQDCGNKVRLCWNNTRHQRGGPREFYRHNFNCTSYLKYGKRYCPSHYIKMKDMERIVLEDIRSLAQLVVEDEEKAKAEFLARKAKHHEEQYSVDTKKLSEGKFRLQELDTLIQNIYEDKVLGKVSEDVAMKLIAKYETEQKELSAEVADLEEKFTTIRQDEEDVALFMERLRKYTDVQELTREMCLELIEYITLDAYVEGQPREIYIYYKLLDEPLKDKRSLF

SEQ ID NO: 627 - protein, 496 aa, synthetic construct
MITYAYSYVRFSSKQQSTGASLKRQIEASEAFCRENNLTLAPLSFHDLGISAYKSKARASLTELLEAVNTGRISAGSYVLIEAIDRLSRKGFDDTHSMLRSILLKGVNVAFVGTDAKSLAGTILTRDSLNDTMAIIQVAISADLAHKESQRKSKLVRDAKKRAKEKVSNGEIAKRRLPFWLTLDGDKYVLNGRVDVVREIINMRQSGYGKHKIAQTLNAKGSKTALNKQWSSQTIKYLLAHPALYGAHQLTERIEDSVINAELVENVYPAVMSKKDFFLIQFDEKRVTSGRTSSNFPFKGVVRCICGSTIVYGPRKMNNKIYHYYFCAASKDGKCTQTKLIPNLSSVLKKVIDKITIQSVVRNQSDVIKQEIQQKKDKMAGIHAKLLEMNDPPLSLFELIRNMEKEIESLSAQLKDESFRSAGATNADVTKLKDISDPVEYNMQVKRIVDVITVYRPNDKQGWLRVKIKKIDGNFQSFIIVDENIRLFSDTEAIKS

SEQ ID NO: 628 - protein, 535 aa, synthetic construct
MTTEQPKAPAIKAYSYLRFSTPEQMKGDSFRRQTKLAKDYAQKLGLTLDDHSFHDLGISAYQGKNRQTGALGIFLRAVEDEIIAEGSYLLVESLDRISRQSAHRAASVLSSICEMGINVVTLFDGRVYSAETLEQDPMTFMMAVLTFQRANEESATKAKRLRSVWESKRKMIAEGKPVRLTSRAPQWLKPSDDGVSFDIIPERGEVVRNIFKWTLEGIGKQSIAARLNREGAPIFGRGKLWHTSYVSKILQSSATYGTLTPFTSRADRKEHREACEPIEGYYPAVIDRETFEAVQALKASISPRRGRHSSSPVQNIVGGIAVCPLCDSRMIRVTKNKAKGWVYLVCHRAKQGAGCVYNAVRVDMVEPIIQDNISFLTAQCPVGDDDFDERFDSLNGQLEGVEELIHNVLTSIENGLDPSKYPAIGERLSALQEQQEALKEEIDQMGQQRISFNNDVAQRRAQKLETAVRENWDDKAQINTLMRGCFSKVVVDFTTGGLMFHWQQGGETELIYTFLDSEWVDPTEASQKPHERHLA

SEQ ID NO: 629 - protein, 485 aa, synthetic construct
MEQVVVYLRISEDRTGAEAGVERQRQDCLEMCGRLGITDPAVFMDNDISAYSGKKRPGYLDLLERVKLGPSRIVAWHVDRLYRRPRELEDLIDLVEAHPIRIETVKGGGFDLNTHEGRLMARQLVAIASYESGHKADRIRRANRQKAERGDWHGGAKYGYGIGGVLIPEEAAVIREMADRFLAGQSVRQITRWLNRDDGPVSPSKGKSRLNVWHESTVGSILCSARISGQRAYEPASKTTATWERRDRAILGPGNWEPIITPEETMRIRAVFNHPDRRVGRSSKSLLAGLITCAKCGNTLVSSGLHRGETSIGKRRFYRCLPLPGRPERGGLVVSAHGIETLVGEAMITRLAATTLPATAPGQDAGVSAAMEQITAARQRMEDMARDYGAGLLSRTELHAAKTAATATITSAELTLGRNAKSSALKGIPIGDEEALRAAWESEWSIPQKRAIIAALIDTLIVKPAQPGKRGARFRPERVELTFKA

SEQ ID NO: 630 - protein, 537 aa, synthetic construct
MSGKRTKARGLGVIRLSKHSNRPDDPSTSPERQKHHILDAADKRGIEIVGWAEDLNVSARKIAPWKRPQLGLWLPNLAQETPTGGRSDEFDCLIFWKIDRIARSVGDFAQLIKWAGENDKNLIATDGTVDLSTNYGKAMAQIVAVFAELEADIIKERVNDGRQALRDEGRWGGGRYPYGFIPRQQDSGGWKLEHHPENAEVLREIVRRVIAGESMNAIGRRFDVRGVPTPSGGKLWEQMHLTPILRHRALIGESTYNGEPVRDDLGRIIQACDPLITRTEWDSLQKRLDAVSIPKNRQPGVSMLLRIGFCGRCGFPLWLRRKTIKGVEYRYSGCSGAWCATQKRTCDALGIRADFLEGMIEEMLMSAIGDLEMIEQIDTMGEDRREELAEKSAKLADLLVASAGAPESVKIRLAPDIEALTVRVTELESQPVIEPVRTQVGTGQTYRQLWESSDDKERRRLLVESGIRVEATKLDGTNQGMSVALIERPGREDDAIMIKQERGISVTLFIPHNLAQRATGNPAVKLLWRRSPLPVAV

SEQ ID NO: 631 - protein, 505 aa, synthetic construct
MEADAGLGRFLLAIESGLIPLDGTSYLCIEQLDRLSRQSIDQANELFKKILRANVNIITMMDSKVYTKDSLNNFMEIVYSLFLMEQAHQESAKKASRIKSVFNGRLAKLERGEKIQYAGQIPGWLKKTKVSGVFEIDEAKANVVREIFTRKSNDESLKKIADDLNSRGVIRLRNKSDGSKLWTTGALSNLLKAESTYGVLIVKQTTKIKSLSGNRNEVTELGRFDNYYPAVISRELFMSAREKLREINTIKDYGRSTSKNLFSGLVYCGYCGERMYFDEDDKMLKTGRKYYRHLKCIGYLHKLCDKGKLKYDKFESVFPWSYAYDAEKGSAHTQAKISALSSERLTIEGELALNRDRLESLTAAFEASEDYDADFFLKTSSSISRKISAKQQELDSIITQISFFAGSVAEPLEFDLTNTSDRDKAKAQLKKILAAIIVYPAESMGFLLFKNGNVQSIDAIARAKTDMKAFSYFAVYAKELRKKLESGSGDAKLKKIFDALRHWSD

SEQ ID NO: 632 - protein, 507 aa, synthetic construct
MGKVYSYIRFSKKEQGAGSSTARQLKYAEEYAKKHGLVLDSTLVDDGLSAYHAKHLSKGALGLFLAAVESGDVEPDSTLIIERLDRLSRQKPRQAQALLSQIIDYGITVVTASDGAVYNEKTIDNDPMKLVYSLLIAIRANEESETKAQRSKAAIQHNINQFQKHKIRSLGGAVPAWFDRFNAAQGWEYKLNEKAGTVRRIVELSLNGTGAKTIARIINSEGHTTFGKSENWGMTSVVSVLKNPALFGRRVVNSNGSIMLDDYYPAVVSRKDFDAVQYRLNKRKNTKGSEKFVNLITGLGKGFCTCGYCGSAIATQNQIFKTKSGERIVRRMHCTATKESGQCHSSKRIEKVEEAVLMFMMERNLDTLKTGDTQSYEIEIDTIDKKIKKMVSLQLALETSELPDDFLDSLAQLRARKAELSDKAAKGGIDIELNEQFKALGEKAIKLENSEARTTVRQIIRDSVASIRIWTCGIELVNEPDIAIEFKNGTRGLISIRGQEIIAQQLS

SEQ ID NO: 633 - protein, 579 aa, synthetic construct
MERDDLPALRALGFTDDELKELDLWEPATGDPADLAEAYIRRSKKKDTLTNLRGHLRDICRRAREEGKKIRRVWFEQRSASKAHIRREEFEQACDAVLVGLSKTLYVWRTDRLSRRGMGAVDRLIDDFERKQRARIVSASEGLDSSQSGMRIVFGILADRAREEAKSITERTQSSTDSHKLEGKWHGGVAPYGLHSPKGSGKLKRLAEEYPTARRIAEWLLARKVPAWIADTLNREQKRTRKGKMWRAQTILNLAHSPSWAGLVPNRERVHDSDGNPLDKWVRRSEPLLDAKGRPVSCGEGVVTYAEWLKIQSILHGRTGKAEPTAHLMKARKNGFGTRKGTRQPKTVMGWILQCPFCKGPMSNGGYNYRCEARATMGESACQGTSTARNRVDDAVATLWIQHILDLPPESDTIHEIARRWLSYQDPTKEQRKQEVTALYDAAIERQAKLRKEYFVLGRISEAQFESLRRDQDMSVSELKTEYDALTQENDLTPLMDPESLAAIWNAEGIEGRRALWKAASKRIVLKPPVEPGDRTPILDRLTVEWRDGKNPVVLAASDSGVESVERCRQQRKAVESAA

SEQ ID NO: 634 - protein, 463 aa, synthetic construct
MEKKKRVALYSRYSTHTQDGNYSIDIQLERMEAMCKSKGWEVTEYFSDAAYSGANMDRPELQNLLSRLSEFDVVMVYRLDRLSRSQRDTMTLIQDHFLLNNVAFVSVSETLDTTTAFGMAMIGILAVFAELERATITERMQSGIKKRIEAGYRLVSGNHMPTGYKKGIDGNGNNILVIDEIQSEKVRRIFDLYEQYHSITKIQHALKEEGYSGRRFTTIRQILSNRLYLGEVKYRDEYFEGIHDSIISSEQFDRVQALLARHPKGANAGKAKESLFSGFVYCGCCGENFKTYSYRLENKIKGKYYVRSYLCRARRYPSEYEQKCMNQIVKNDTLEDLFLKNLDILIENRQTKTVSSKRKTNYELALKKIDEKIVRLLDLYEDGELDKETLNTRLEKRKKEKEDILLKKNSEAQNEAINIEIKDIKKYLTKFQTMDFIEKRALVEKVLDRIVIEPNDIIFEWII

SEQ ID NO: 635 - protein, 583 aa, synthetic construct
MSAKAYSYIRFSSPEQAKGDSYRRQKDAAVRYCQEHGLELATTTEYTFLDKGRSAYSGRNLDDEGQLRRFLDLVENGTIESGSYLLVESLDRLSREKVTTALPRFMDLLNRGIRVVTLSDGRLYTEEFNELDLIISIVHMSRAHNESAIKGDRVSAAWANKRVLARSDKTPLGKACPYWLELVDGRYQPITNRVETVRLIFELAIQGYGQGSIPRILNERGIPVFGSRNRNHSGAWGSSSVSKLLNNRALLGEYQPTHMVDGRRVPDGEPVTGFFPPVIEESVFYQAQAVRAERRVHRAGNQSDRFNVFQGIAKCGACGDAMHLVNKGRPPKGATYLQCHSARKGVCKNGYVRVERAERALREVLAKVDSLSLVQASEGQTAKELAALKGKTQEVNERLTKAIGFLSEAPSRALAVLVQTLEGELAELKKEEQKCQELLAVNQVTSKKDFFAKLDLVSFEGRHAANSLLKRLAIVVTMSIAKEHQSYSAIKDGILQLQIMQYLEGIVILAANEGVLDLQILQGELSPTERAAWLQWFEIRRNGLPAGAIEQIRARLQNIDLSKVRFKGLPDEFKKVIPVRNPE

SEQ ID NO: 636 - protein, 450 aa, synthetic construct
MTLNNTDNIDTRRIAIYIRVSTKKQYEEGCSLEVQENQCRKFVYKMGYTEDDIDIYSDGGKSGTNTNRADLLDLLAGISQGMYKMVVMMKFDRLTRDLMDFNSIIKICNNKNCSLIPLDNPKTDLKNPMEKANANVSMIFSQLQPELTSQRVKDVIRDKLENGLYPFGGKPPLGYIRETSEKLVISNNIEEVRIVKRIFHEISLGKSALQLAAELTIEQALGRSWVDKTLIRMCKNRIYIGEIEWNGKIYTNILTDLIIDRDTFYRANYFINRSARIKKHDYAYHNLCICNDCSTHLEQKTTNKKGKIYFYYYCPKCNKRINEKIIDRQLTNVTNDLYNKEILNIEKSSEEKEIEKEIRRLSKIVSNYYEITVTEGTKEQLLEYNDFKKRTDKKISYYKKQLNNIQEFQRKKVSNITSISKELKCQLFQKYVKDIKINLVEKKVLKITRI

SEQ ID NO: 637 - protein, 504 aa, synthetic construct
MSDKYLMYLRKSRADGEHETVEEVLAKHYKILQDYAAAKLGGVIPEDMIYREVVSGETIQDRPEIKKLLDRIQTEEVKGVLVVDPQRLSRGDLSDCGTIIRAFRYTDTLIVTPPKTYDLGDKFDRKFFEMELMRGNDYLEYVKEIMMRGRIASVNEGNFIGSVAPYGYDKVKVGKAYTLVPNSEADTVRLMYELWTKDGLGTTTIANRLNELHIKPRKSEIWNNASIRDMLRNPVYIGKIRWNCRKTVKHYEGGELISSRPKANKEDWILVDGKHEPIISEETFNASLARFGSLPKVKAKSGLKNPFAGIMHCSCGRPMIYQPHKKCEARLHCAYQMRCGNRSATYREVEEEVIRALRQLVAELSEQLAEGTQNTHDAHKAIAEALRKELNALETQQERLYEFLEQGIYTSEVFVKRNAALAQRRQELQEAIETAKSYQVSEVDYRQKIIALHDAIAILEDPTASAEEKNNLLRTVIKDITYHRETEVRDKWHPVPFFLDISLI

SEQ ID NO: 638 - protein, 488 aa, synthetic construct
MENNIAFYMRLSVDEKEKLESESISNQRLLLKHYISLDKDLNAFNIKEYVDDGYSGTSLNRPALQRLFGDVKIGKVNCIIVKDISRFMRDYITLGDYLENIFPFLGIRFISVNDGYDSQKESDTGIDIGIQFKGLLSDFYAKETAEKVRNSLLALKQQGKCMQANPPYGYIRDPDERTKIMIDEKTGEYVKRMFGMILEGYSTIQIARTFNKESVITPSARKREITGQTYKERSIYTENHTKTIWMNSSVCRILKNEMYTGTFIFNTVRKTKLYGGLTTKIPREEWGRIYNHHPPLISYEEFNQVQSILASRAIKHVSSSKKKEKSALQEVLYCKDCGHSLVIMQRKEARNLACSTCMMKEIKTNFEKIEVIEKQVLQLLQEKIDVQERYVKGNIQEIHSYSLEIEKLEKEKIKSFEKYKANKISREDFIKVKNKINDRILRLNQCIHDTDPENVDNEDISILTKELVEKYILKILVHHNGGFEVQYK

SEQ ID NO: 639 - protein, 417 aa, synthetic construct
MELKKDGLYFAYLRKSREDRDAEQHGEGETLERHRKILCDMASRYGITVATWYKEVVSGETIAARPEMLKMLEAIEDMRPDGVLVVELERLARGDTRDQGLIMETFKYSGTRIITPMKIYNPNDEFDEEYAEFGLFMSRREYKTINRRLQRGRKSSISEGKWIGNKSPYGYERVKIPNDKGFTLQAIPEEAAVVRLIYNMYVHGTPESGNIPVGTATIGHILDDMGVKPPNGSYWPACTVRRIVENPVYIGKLQHGYRPQQKRTVNGKITTSRPISKEYQIYNGLHTPIIDQELFDLAGQKRKESYRKPFFHGIKNPLAGLIYCTECGKSMYRRPASPTCRDDMIMCATRGCKTSASYYYLIEDRLLQALNQWLDEYRVQIEDTSLELNRAQLERYKTQLASAQEAETTAQKQLEKA

SEQ ID NO: 640 - protein, 518 aa, synthetic construct
MVAIYVRQSLDKKDSLSIESQINDCITLCKRNGWDDYQVYKDKGWSAKNLDRPEFQKMNNDVEAGKIKAVVCYKIDRISRSIRDLVNLIEDYHELGVHFVSFADNINTAAPGGLMMATLFGSLAQMEREAIIARVTDNYYYRCELGYWGGGPAPYGFNLKKIVENGQKHTVLEINEREAAVVKQFFKWYLEPDGTIYEILKKADKAGITTRKGGAWTSRVISELLSKPMYAPNSMDIYNFYAAQGVRVRVTPEQCDGKLSLNVFGRRDRGSKHPKRSRPVNEMTLAICKNPPIIDSDTFLKTQFKKKAKLQVSPRTGTAKTTMLSGLVKCAVCGRAMSPSGSSRGVRYFTCSGKRNYAAGTCTSKSIKVSALEKIVIDDILRYATNPKVIDMFHAMQGSKLTAEQSHEVNLLQQEAAKLDIEIDNLLDACSAGNTTAIEYLNKRIEKIDTRKHEILTRINEIKRDTENVINLFSGIEIENVPYILAHGSIDEKKNVCQFLLSSVLFTNADDVKVYYKM

SEQ ID NO: 641 - protein, 479 aa, synthetic construct
MKPQRAVLLLRISDDKSGDAAGVGRQEEDGRRLAVRLGWGIGHIIVENDTSAFKRRKIRLPDGTTALRTVRPGFRRGLDLLASGEADGLLAYDLDRVARDPRDLEDLIDVVESRTPRVPVESVSGSLRLANDADVTMARVMVAVANKASRDTARRVSRKHEQLAEQGRPGGGGIRAFGYERDGVTIRESEAEVVRWMAQAVLDGQSLNGISRELQARGVSTVRGGEWNIRSVWSTLTGPKIAGLRKFRGEIVGKGTWPAILDMDTWERVRQRISDRALGTSNKLVRWLTGSLWCPLCGGRLIGNSVTSTRRNVGPIYWCSTERGGCGKISVRASHAESEVERRLLDYLERPEVFQALASAASGDSMEQLRAEVAEDEQQLKDLARMWATKQITLGEYSEARRIIDQRIKDARMYLVASAPRLLRSLLAGDARAGWVEMEPVDRRDVLAAVIPDGFWVFPAEKRRVFDPNRIRLRQVSEE

SEQ ID NO: 642 - protein, 624 aa, synthetic construct
MDAQEVMHMTDYSKITALYSRLSVGDEDRDGGESNSIQNQKIFLENYARGQHLTNIRHYIDDDESGRFFDRSAYSRMMDDVENGKIGVCIMKDLTRWGRDYLQVGNAMEIFRRNNVRFIAVNNGIDSEKPDTLEFAPFINIMSEWYAKDISKKVKTGIKTKGMSGKPIATEAPYGYVKSPDNKDFWIIDEEAAGVVRLIFRLFLDGKNRNQIAVYLTQAQIPTPTFYMKERGRGTCKNRALNEANRYKWNKATLTHILTRQEYCGDVVNFKTTKHFRDKRNHYVDRSQWQITENVHEPIIDRTDFETVQRILENAPVKRPNGDGEIHPLSGLLFCKDCGAKMHIRIDYRNGGKRHVAYCSEYHKGKAKNPKCNSPHIIDADLLMQTIAEVLKKIEDYSISNWAEFEALVKKNLAMQQTDKTKKQQKRIPQITTRLEQIDKVLNKLYEDNALGTIPQDRYEQMSQKYSEEYYALKAELAELQEQLSAFENAGGRAQKFLKLTERYAAFTDLTPAILNEFISRIEVHERDKKRAKQAIQHIGIYFNYIGKFENEVTQLTEPTEQEIRQMREEIEEAKKEKSRAYHRQYSREYRARNLEKQREYDRIKAREYRARRKAQTAAAQPAQ

SEQ ID NO: 643 - protein, 615 aa, synthetic construct
MLQAKTPKAYSYIRFSTPEQQFGDSERRQTELSQKYAEAHGLTLDENLKYRDLGVSAFDKSNIRNGELGTFLRAIDSGAVEPGSYLLVESLDRLSRAKVTDALEVFMSIINRGIRLVTLMDGREYSKERINEQFTDLIISIVVMSRAHEESQTKSKRLKEAWKAKRGRIGDAKLTEMAPAWLKLNDERTAYSLVPDRVELIQRMFQWSKDGIGSETIARRLNQQGLPTWGTRKADQWHASYIKKVLDNRAVLGEFQPHVLVNGKRVPEGDPAPDYFPRIVSDEDFVLAKTARQSRRTNSAGRKGQTFSNVFSGILRCGYCNGSMVYVNKGHNGPRARLLVCARAKAGKGCHYVPWEYPQFERSVLTYCKGLDFDAFLQTRDTVKSELAALSARIAVLESSITDNEQKQANILEAIESGAKFQQFEARMVELEQNRMKFNAELDETRQKYNLRANAKIDVTAVRASIDGVLHRISELEGDELYDMRARLSQHIKRLIVRIAMYPGGYIESPFFVEKLRAHLLSRRIDTNAADEYITSRLKLTPNVNERFFTMISRSDAVRMIRPDLDNPEILHLQQGEGGQGPAAHAEAIGAMLEKLTEVARKSSDSTEVLPDAGC

SEQ ID NO: 644 - protein, 601 aa, synthetic construct
MRVAIYIRVSTKLQEDRYSLSSQKLELTRYALEQKWTIVDIFKDVDSGGKLHKVGLEALLDCVDEGKVDVVLCVDQDRLSRLDTIEWEYLKQALRENNVKIAEPGNVTDLSNEDDEFISDIKNLIAKREKRSIVRRMMRGLRQYTREGKVWGKQPDEYHYDVNTKELTINEEYAWIIPRIDQLYLEEQMGLHRIAEYLNSVVKTSSNRKWTAVQVRNKLINPCYHGILRREFPNETIEVEGVYPPLRTKETFERIQATLQKRHMVYPSSDFHFLRNISIKCADCNHILSVRKGSTHGDSSKYYLKHAVEYVNNKCSANPSINTDRIKRPLIAALQDILKSEETAQKYFQTEYNEEDVHLIEKEVKHLKKKLLDTNSKLDNLLDLYLDGTWSKEKLDERKLSFEQEIKGLQEQLKNRENKLKLIREQRLNYNTVIQYFVIIKDMDRLLDEGDKQRLLGALFPTATYRPQTNELILHAIVNGKITLDITIAIDDKDVIYEERLVETYRKRYNETQQLLSENKWITFKELTRISPYNAKTLRKDEQLFGPYQYLMPAKGSKELAEYKRQRIVEYIDLNGKKSITRIAKDLGYSRKTVSELLNML

SEQ ID NO: 645 - protein, 507 aa, synthetic construct
MKQVVGYARYSSDNQKECSIEIQKQWIEKYCEDNALKLVKVFADYAKSGSTEEGRDSFIEMRNVLIDDEDIDGVVVYKIDRLSRNNADAVKFIDTVTKFGKSIYTDGGILSDKSSPMEKLIFSFGSSIAEFEWGMIRQRTRNGSLHKASLGPGSLGGRPPLGYIRPDPDGPLVIEPRKAEIVKKIFDLYVNKHKGYGEIAKTLNSYGYLTQRNAEFGKNSIRDILLNEKYTGVDIYNKTSAKTFGKDGKYHRNSHIRKPNSEIYRHPDAHPAIISKELFDKAQELMKSRSRKGGHKSNALFTGIICCGFCKSPIHLDSHSMTCKNGIKYTYRKYRCNHYSDPGDHAKVRAEAVEHHFLNMMKYKLFHEMNKTDLHKQLQIFFSDNSSGLKQLSLHKVKAHECEKKMNRLARSLEASENENVQQRIIANLDTLSNRLQKLNQRIAELEQANRWDYTENELTAIIDSFEPLVLKYAKCQETKDFIRSYIDKVTIYDVSISVSFNYSEAG

SEQ ID NO: 646 - protein, 507 aa, synthetic construct
MKRVISYIRFSSERQAKGDSLRRQSKMVNDWLKAHPEYYLDQDLSFRDLGVSGFTGKHLKGGLGDFLTAIEKGLVKAGDTLLIESLDRLSRQDIDIASELLRNILRSGVDVVTLSDGEHYTKESLKDPLALIKSILIMQRAHEESLRKSERVQAAWDAKKEAAKAGIKISKRCPAWLKLNDDRKSFSIIPEKVETIKRCFELRLEGRSIWDIVRTLNDEGHQTMNQYKPGKFGQTSVQDLLKNRSVIGYFTPKGYEEIAGYYPSVIDETTFYRVQQLAYSRYGRKPVSENPMAVNLFKGIIRCSKCGHALIITGFSEKRSGIYRCPCKQENRCDAKGLSRKQTDGTLLALLSRIDRFEPEQVNLVDGLKLQREGILKNIEKLVELSLVVDDMTAITSKLKQLKSDLSLIESDIEKENQRIKSIDTGALSDCDMSKKAGRIEAQLIIRGVVKEAILDTANKRCKVIFHNSKVIELPISENPSEDVTDAIQSITEIAEKDLLEVDGFQL

SEQ ID NO: 647 - protein, 555 aa, synthetic construct
MATATLTRSAGTLSVPTGGMEMTTQGGVCGCHGRPWVDLLLRKSKIVREGERALSIRAQEDRGRAWADEHGYCVRKVWKENLSAWSDVQRPKYDAAMAAVMNGEVPCLWVYALDRFSRKGAEAVVPILGKARVIFDYERLDSMDERDRRWIIDRAENAREYSQRLSYNVRTTKGKQRNEGRWLAKAPFGLVADKETRRLSPDLSPYLCVVKGRRELSPWEVVVRIFTEIAEGVSSRALARKFNEEGIRSSTGKFWRADSIRAIVIHPVYEGWLTVSPGGKSHKSPVHYVNDKGERVRCVEPDVLPDMISATLAARARRVLSGNQIIDNTPVEGKAVHALSGKMRCASCTNAMVLDGKSYNCQRRAAGGACPGPASAWREAIERYVVQQWADRLYRAADDDPLMIAVAERWQALTRPDENAEIKEARAELKAAQAKLDKFMADDAADFYTGRSAKYRIPHKNAAEKRLDAAEERVKELTGGGRVDLSFLMEGHAEATWRAADPMLRRDLLGLAIESVTVTKSPGQGKRFKGDERVSIVWATPEGAEPDADEFEQAA

SEQ ID NO: 648 - protein, 458 aa, synthetic construct
MRALIYARVSSDPTGKGRSVDDQIAACRMDCARNGWTIIAELREDGIGASRWSGKDRPEYRRLQNLLVDADVLVTWEASRAHRDLEAYVELRRLCEEHGVLLRYSGRTFDLSQGDDRFATGLDALLAEKEAEQIRVRVLRGLESRAAAGEPHGKIPYGYRAAIDDAGNRVRVPRPEEAEVLRDAARMVRDGRSLRAIVKQLNAERRTNRGRDWTSVELRRKLLSPTYAGIRVHHGKQVPATWQPILSDEEHSAVTAILTDPDRLTQRGSEPVHLLTGIASCGKCGAPMGRRKNKSGSSSYACTGKFCVARSMGVVDEFVEAVVVKRLSRPDIAQALQSGDDSQRREAFAEIRSIRANLAAYEQQAIDGHLEPEEFLRLRNGLREKLADAEARANQSLGGSLLPAQIAGPDAAELWANLPMESKRGIVRAMCHVLIDPAQRSNVPNVDLIRIEWKTPSA

SEQ ID NO: 649 - protein, 466 aa, synthetic construct
MCGTFLHKGGIVMECVAYLRVSTEKQAEEGNGLDSQKRDIENYCRKNQLIISDWYEDDGFTGSNMNRPALQRLINDCSKKKLKCVVAFKLDRLSRSMVDGIYLIERVFIPNGVDFRCVHDSVSYDSPMEQAYTQMMAVFAQLDKNTMLLRMRGGMLERVKQGYWMGGGNTPYCYRYSKEDGILVPIPERKEMALRAMNLYISGYSDVRIQKLIGFKSEFVTRQVLTSPVNIGMIPYKGKLYRGRHEPIFDIKVFELAQELRKTRKQSKSFCVNHENQLLTGLCYCGVCGCKMRYQKWTHGKHKIYCYSRDNGMSYLPNYNPNCSNSLEWAEDIEKQVEDEILKISLNLSSHKPKERESCLDILSKQLQKEKTKLKRLYTLYAEGNDTVLEMIKETESGIDELKLKIQNEMKSPDNSQKKEFVYDNIKKLADVWEHIDKQNKNRILKTIISKIIIVNGNIEIQLKKF

SEQ ID NO: 650 - protein, 473 aa, synthetic construct
MPADRPLRAAIYCRISLARFDDTLKVDDQERVCRELAAARGWTVAAHHVFKDNSKSAWRRDRKRPGWDAMLAAVKGGEVGAIVVYHGDRLVRQMSDLEALIDLADTKGIRLASPTGERDLDNADDRYILRIEAAGNTREVDATSRRLKRHYDRLAEKGIVRLGGRGGRAFGFEPDGLTVRETDAEVVREVARRILSGEPVGAIARALNDRGVTTTTGGPWDHGALKKLMLRPRLAGLVARHGRIVGSAAWPAILDRSTWETVCATLERKAAAFDYTTNARRYLLTGIARCGTCTEPLVVRHNTRPGLTGYGCINRDCERKVHRAIHHLDPYVTGAVIALLNDPKVREAMQPAAAVDTAPLVAQLEAQQASRQRWLLAAAENPELGPDVLAVTVRRIDQLIAELREQITAAQRPTVLDGLWGIDKAGWGELGLARQRGAVAALLRITVFASGRRGPGFDPKTVRLDPAWLDAQP

SEQ ID NO: 651 - protein, 480 aa, synthetic construct
MKKAVIYARVSSKMQAEDGLSIDAQINQLREYAVDNGYEILNEYVDKGESAKTADRPEFQQMIRDIKGDKNSYDAVLIHKTDRFARNREDSIVYKSLLRRDCGVDVIAIKEDFGEGPIGKMIEGILEVIAEFYSENLAREVKKGQVEKAKKGQALGEPPYGYIIGEDGKFKIYEPEAEVVRYIFNRYLEGDGSHTIADKIKEIGIKQFGEAAIKKTTGKELNWSSNRMVLFIIKNEVYTGLFEWDDIIIEDNHPAIISKEEFELAQELRDKKKGRGCGQRNMYLLKGLLKCYECNSNLGRKNYKSKGKTVHVSYCMNNRINNECYSNRNKMADLEKHIIKSLEKISKGITKINNLTVTRDDKDQNQKQIKKLQKKLEEFDKQFDRQMEAFEAGVINIEQLKKYKTRLNNQKDEVKNQIVKLKDVKKDIDENKFRNKINNVVTLLKDESININKKRLALLSIIKEVRVSRKNGIIKMIYKW

SEQ ID NO: 652 - protein, 557 aa, synthetic construct
MPKAYAYVRWSTASQGEEGRDSHDRQTTPLQAFTEVTGVPVVETVIDKGISAFRGANARIGQLKGLLDRIESGEIEHGDYIIVESIDRLTRQKLTDSVDLIQSILKKGVRLHTVFDNKTYSYDDPSRDLETLILVGVIAKRAHEESDTKSKRLKSVWVKKRDTAETNVIGKRCPYGFRFDEQSQSFIIVEDEAQEIRQIFDLLKHVGVLESVKQVNKHSKRRWTRTAVLQLINSKSPIGVLRLQRRNENGTKAFDRYVPNYFPKIIDEIEFSAAVAAMKTRLNGRNYGRRTPHHYNIFRHCIQCEEHKCGMIFNLQILGTEKKRYAYLVCSNRAERVCECSNRIRFELVFGTFLAFVRQLSENRYIDERTDKKRKDFTWFSQDQYKQMDTVNDAFSRFFSVRDTSAPKEEIRAKKAKLTTEKSTLEMLEASLAQFDGIIPNTFIRRVADSEARITVLESEIQKLEGTLAIEAETLEITTYEDIIALYETEEGRLKLNTFFITRGITFDVKIDKETNLVGMDIRIKGEKDFNLYTHQFFKQKAPLTPFGIPDLSHIIK

SEQ ID NO: 653 - protein, 538 aa, synthetic construct
MRALIAIRLSRVTDATTSPERQLEACRTLCDQRGYEVVGIAEDLDVSGAVDPFNQKHRPNLARWLAGEHVDDSGNVVPFDVIVAWRVDRLTRSVRHLRRLVDWAEDHGKLIVSATEAHFDMSSPFAAVLIALLGTVAEMELTAMRERNRSAAQHNIRAGKYRGGLPPWGYIPDNSTGEWRLVQDDEQVAIIKEVVRRVLKHEPLRAIAHDLTDRGVPTPRDSFAKHKGRPAKGRGWSSGRLKQSLTSESLLGYAMSGGAVVRAEDGSPVVRAEPILTRDKFDRLVKELARRENRKEPYARSTALLLRVIFCSCGRQMYALKGGQGRQYRYRCASAQYKNNCGGPSCLAPDADQLVEGAVLGLLKDSERLEKVWDPGDDRSAELATIDAELADLAGQLGTAAFLPGTPQRQRLNDRIEKLAHRQAVLSRDVTRPAGWAWKPTGELFGAWWKSQDVVGRNVWLRDAGVRVTFDHGQYRLDLGDVDTMTKQLKPAGAVAQWQQNFATMTESGIAGIEILTNGEMIFHHKSGATVSSSELDN

SEQ ID NO: 654 - protein, 540 aa, synthetic construct
MKAAIYSRKSVFTGKGESVENQIQMCKEYGEKNLGIKEFVIYEDEGFSGGNTKRPKFQELLRDVKKKKFDTLICYRLDRISRNVADFSTTLELLQDNNISFVSIKEQFDTSTPMGKAMVYIASVFAQLERETIAERIRDNMLELAKTGRWLGGQTPLGFKSEKISYFDAEMKERTMYKLSPENKELELVKLIYNKYLETGSIHLTLKYLLSNSIKGKNGGEFASMSINDILRNPVYVRSNQMVIDYLKDKGMNVCGTANGNGILIYNKRNSKYKKKDINEWIAAVSKHKGIIPANTWIEVQKTLDKNSSKSTPRQGTSKKSILSGVLKCSRCSSPMRVTYGRKRKDGTSIYYYTCTMKAHSGKTRCDNPNVRGDYLEKAIIKKLQNLNSDVVIKELEEYKKQLAATTENSIIKNISKEIEEKKKEMDSLLKQLSKVESPVASEFIISKVDSLGTEIKDLEISLTKTNSKKKENSNIELNIEIVLQSLKEFNTFFNSVESLKTDELTIQRKRYLLERAVDEITIDGETKKIGIDLWGSKKK

SEQ ID NO: 655 - protein, 528 aa, synthetic construct
MTPQTVSRPRAYSYVRFSTPEQSKGDSLRRQTEKAEKYAAEHGLILDDKVSMLDAGVSAFKGANVKVGALGDFLSLVQYGDIKPGSYLLVENVDRISRDNIIDAQMVFMGIINAGIVVVTLSNERAYSRESITRNQFEIFEIIMGFIRANDESATKAQRLRSAWHGKRLKTANQREVMTKQGPRWLRMREDRSGFDVIEDRAEIVRRIFRDTLSGIGQNQLARALNLEGVPTFESMGSGRSAGMWHSSYVSKLLRNEAVVGRFTPTRRERTHDGKQLRVPTETVEGYYPAIVDLETWEKVNAMTAGRVSYSAKGDMPTNILAGLAACPECGSKMTRLNKGNGKTKRHAYLVCVRAKTGLCKPYKAVPYGPIEAAIIEKRETFLAELPSPDETLEAEWQRLLQADEAHGDEIGKITDAIKAHGFSAALSDTLRTLEDDRAAIRARLVEVGERVTATLTNRVLQTVDKMVALLEANPIEIAPISAIMRQLFTMVEVDWPSGHLRFHWRHAAGETTRIMYAWPKEANTLVR

SEQ ID NO: 656 - protein, 583 aa, synthetic construct
MARTKNRHISQSETGTEDVKAIEKTYIAGIYTRLSQERKEAYRDKSNSLEMQEELCVKEATKKDIMIFRVYKDYEYSGTNFKRPAFLEMMEDIRVGRINCIIVKDMSRFGREYLEIANYIEKVFPFLGARFISVNDNLDTKDGIKSDKSYEIAIKNIFNYLYAKDISKKVKASKEIKMKQGAFIGATAPYGYKVDKIDEKRVLVVDEKAAEVVRLIFHLAGQGKSNIQIARELTRIYTTPAEYKRTGELYKNKYDIKQWDISYISKVLSDEVYIGNLTQRVYSNRHDLSRKSKFRDKDEWIVKENIHEALVEKDLFEKVRRIKEKNQGSLPYHSLKNTIKDGKENVGLKIQRDQNKEGKYDGLIVCGVCGRNLKKQYGARGLKVNDEFCYCYYCKGGDRLKLEKSHVRIYETDLDKILVNTLKRLFSSFYQDWDEIHLKNYLENVSAKKLKQISIKIDTDRKKIDALKVRLQKEYEGYVRGNILLSEFKTEGNRIDRQIKTIKNELKVLDDKKRMIITRKKELEKFIEVLFCYLDYDESIGVDKGFVDTLISHIEVSKYKQVTIYFKFNLEKNMEKQLEVEYE

SEQ ID NO: 657 - protein, 560 aa, synthetic construct
MWYTVRVRICCTAVKGVIMKNKQPKKAALYCRLSVDDGRMGESVSIGSQKLLLEQYCKDHAIDNYEVYDDDGYSGTNFNRPGFLRMYEDIKKGLINMVLVKDQSRFGRSYIEVGMYVEKFNELGVRFIAVSDNYDSVKNENDMMFPMRNVLNDYYAREASIKTKTAKKAKAKAGQFIGSKPPFGYKLDPNDRHHLVIDEPAAETVRRIFRMAAQGIGYNKTAKIFREEKTLTPIAYFNLHNPDYFKSDYWRREFDWHVTSIRVILENEVYLGKLVYGKQKTRSMKSKKKVKCPREEWIIVENCHEPIISQELWDSAHRMMSVKRRATKTGEFQIFAGHLYCADCGHALTYSQKQRRDGTYHGAYSCWLYKTHGKEYCASHYINYDVIYDLVLKDIRRLLRSYRKNKDGFRAFLENRCSGISSKRIVMLKHELDKAQERVAELDHLLNKLYEDNALGKIPDNRYVQMSNRFEDEQSKLKESVNEMSSELAKYKLTTDETEKFTSVIDKYTDIKELDDIIINEFIDKIFVHHKEDIDGKTFQQVEIYYKFVGNLNQTTRKAA

SEQ ID NO: 658 - protein, 643 aa, synthetic construct
MSTRYQVDKDSLPFQRKKLKEYCKLMGIDAFQIFEDDGYSAKNTDRPHFQDMMNRVRAGEFSHIIVWKVDRISRNLLDFAAMYEELKDHRVTFISMNEQFDTSTAIGEAMLKIILIFAELERNMTSERVTGIMLDRAENGLWNGARMPIGFRWNDETKYPEPDPEEVKIVQFIFDEYEKTRSALQVTRYLNNNHVKSKRGGMWSSKLVHDIIRNPFYIGTYRYNLRESGRGALKPENEWIIRENNHPAIIDKEQFDRCNRIMDENAATRDVSEIRKTSHIHVFSGKLVCALCGSHMIASKDRVRENGFRPSYYNCSRRAKMLDCENKKVISDLYIGPFIFNYVANLARVQKEFKNKKIDSLEKLEAALLKGDEYNGARLTEASLKATFSALAYSGLGKGAYLPDLGLSEGEDDISITERRSILDKEREKCQNAISRLTELYLYDPEALTKEEFSKKKKELTKKIRDIEGQISEITESGGGSDLADLSFIKKASAFLVAQRIVSKKHIDYIQMCLDLDNEILKDFIDQVVDQIVALDGRVQKIRFVNGLEHEFVYSVPAELPKCRACGCTIGKTVSCRIRTISYKGKSYRRVKVGDPGDPYEGKKVAACAACGVSFGRFHHADCEKEVCPICGGQLATCEHRKK

SEQ ID NO: 659 - protein, 482 aa, synthetic construct
MTTNIHKMTQAISYVRYSSKIQQEGDSDRRQNERVAKWLSEHSGFNLVEEYSDEGLSAFSGAHLAAGSDLNRLLMDCKRGIYQQGAVILIEAFDRLSRGGIDATQQLVREILLTGMRIVILQDNPDKFYDRSDLNDAFAVITIAIKAQAAFEESEKKQKRGLINWSQKRLLAAQGKIMTRACPAWLRVDEEGTRFEPVEPHLSTVRRIFKQRLAGDSMSRIAKSLNDDLTPNFKGGVQKWNQTTIQQLLKNPAVYGCKVVSSQATKDVKASAEPIENYYVWTNKLTGKPEVAIPLHEFQQVNQIVTAWAKGRSAGSKDDARLVNVFKTVLVCAHCGASIIQSSIKPMNPKHYTYGYYVCSNKRLGRCKEAKAIRRDDVENAIIQGLLYNTKRLLSGTKATENELVQMQAEETLIQDKQRKLVDLLLDDRIDKETYNTRYDALTASLDQLQKQINQHRQTVSCDFPTEFVRNIDLNDKVNRHG

SEQ ID NO: 660 - protein, 575 aa, synthetic construct
MAHGVQLQSSSLLRAVGYCRVSTDKQLERDLSVPDQQRQINQHCEKNGWRLVNHYIEGGLTATDDNRPEFQRMIERATDDDHPFDVIVVHSFSRFFRDLIGLELYIRRLAKSKVQVVSITQPLGSGPEHDMLRQMIGLFDEYTSKEISKHVRRGLKENARQGFWNGSRPPLGYRLEEAERRGERIKKRLAVDEIEAETVRLIFRLYRVGDGKSGPIGIKSIAKYLNAAGHRTRQGGYFGSSLIQVMLRNTTYKGEFLYNKRNYKTEEENPVEETVLVAVPVIIDPTEFGVVQALLSARNRLVTPPRIVTGPILLTGLTFCSKCGGAMTMSSGTSHTKKVYNFYSCLAFRKKGKLACDGCNVSMPALDKLVVGRLTERLFTKERIAEIIREIAQRRATKSTQADKRAAELRRRALDGEVRLNRLYRSIEEGIVELDDLLREKVAALQSDRRKAQDALDRLTEATIPAPEVSEGMIDEFVKVMRESISEGSVPFRKAYIRSVVERIEVSDDTITIVGAKLKIDQAVKAKELPLSSVRGFEPKWYALGESNPSLQNENIFFARAKTCKEASKSPNTLK

SEQ ID NO: 661 - protein, 485 aa, synthetic construct
MTDLKIAAAYIRVSTDDQVELSPASQLVEIRKWGTANGYLVPDEFVFVDEAKSGRKVTGRDEFRRLIATAKTKPKPFDAILLWKFSRFARNRDDAVYYKSILRKQLKIEVISIKEPIEDGKMGVIMESMIEAMDEYYSINLAEDVKRGMEEKHRRGELQATPSFGYTVLDNVLVPVPEEAVYVQEIFSRFVSGEGFYSIARWLNSMGVKTHRGSTFANRTVEYILRNPVYIGKLRWNPAGRSRRDYADPNIIVTDGKHEPLVSEETFQQAQTRIAQLKAAMPYKARPLGSNKDWISGLVRCASCGSTLIFAKPHYWKCNNYVRGRCRASQHISSDLLKKAILDRLHMDAAASAPLSYEVLRVNGRDGDTTAALRTQRASLERRLERLREAFLAGVDTVEEYRQLKEDAQAQIQRIDQELSAAAAENRRAGDVSIMRSAISDALAVIENEDASLEQRCNAARSIIDRITWDKAQNLLTIHYRLMLE

SEQ ID NO: 662 - protein, 541 aa, synthetic construct
MQKKAYSYIRFSSPQQLKGDSLRRQLEASRAYAEAHNMILDDSLRDIGVSAFKGKNATEGALKKFIELVEAGRIEKGSVLILESLDRLSRQQVFTALGLFSSILSAGIEIVTLADNQHYTAESINDVGQLMFSLISMSRSHEESAVKSKRLAASWENRRKLAIEGKRPMTGQCPRWLRLSDDKARFEVIEERAEIIRDIFRQSIAGTGQRKIAANLNERGVPTFNGGDMWHSSYIAKIIRSKSVIGEYQPKQKGEPIGEAIADYYPAVVSEELFYKAQSARVSRQNPASAGRKGLKFTNLFTGMCKCWACGTTYRLIRNGRLHMFRCNSNYMSNGCACDKRWRYREVEAAALVALSNKVDWFSALGGHTNNRQALESELSILRGRLADTEKQVERFAELFSMADGAMLTDARNRYMKAMQAADELRLAIESKEAELRTFSPVQERVDRLSAAIFDLRYRKKQDAALYELRARINAAFRDAGLCLYFFEQGVIYEVASTGQAGVIITEANREAEALLARAELVNHGLKGLKEALTCSTASSG

SEQ ID NO: 663 - protein, 595 aa, synthetic construct
MRAIGYARVSTTKQDLARQRCKITNFCGENGYELEFIIEDFGISGATLDRKGYQRLNSLTDNDCDVIVVSEISRLSRKEQITEALNDIQQILNNGISVILLDDSAKVYKAKENLNISELLLLIIQLWGAAQERNEIKRKNQDGKQALFKSNPYAVVDAKIPYGFRSVPNTISNRPKYLLEQDPEEVEVVKKIFELVLDGKTLYGVMQYLNDRNIMIRKGMPSISILSRIIHNELYIGIRKRTQSYGKVKGKEDVAIQHIEPIISEEEFRRAGERIEINNKYISTARVYFNPFKGIIRCRCGRSMMVKPKKRENGVTILTYRCSCNESRNSSKFCSVNIDETSYELTNSVIKSLFIQRSQEIIDYYKETGQTRVNELNEIIDGIAKKIDIANLRKEELNNRTKQNVQKLLVATNEVFVKALEQDQAKTDADIKKVDSEVASLRRKEREIINQIYSIKKAYSNIDAYERISKISNDELTEMYHLYLEKIEYYPITTMKGFYKVLFKSGMIFYIAITKVRCSPAAYIVDADVNLETGDMTFKYDMATADGTFSFSPTQIKTVNIKDFFLSEWTEYSFAVRLNLDLSYRERYTKQLEDK

SEQ ID NO: 664 - protein, 468 aa, synthetic construct
MKRAALYERVSTTTQAEEGYSIDAQINKLTKFAESKDYIVVNHYTDAGYSGSKMDRPGLQNMIQHIKEKKIDIVIVYRLDRLSRSQKDTIYLIDDVFLKNNVEFVSMSESFDTTTPYGRAMLGLLSVFAQLERENIRERIKMTFAERARQGLYHGGSSIPSGYYMENGMLKVNETEAFVVRRVFELYSEGFSYDKIGDYIVDNYSGMFSFSPRSIPHMLRNSIFNQKIKHYEKEYQGVHERIISEELWDKVQARLNRNSKIVRSGNFTFLLTGIIYCAHCGAKMMAMRGPKLKSGKRYGYYQCYSKRGTPKYMVVDPNCPAQKTYRSDMIEKHVIDSLNKLTLEKFEEMIDDTQTDTQSMKKEIEELDKKLDKLIDLYTIGSIPKDMLSVRATDLSKKKASLIKTVNEIENKNIRKKERFALDQTKKIEELKDLDWENTSVQEKRKIIYPLIDKIEVSKTDVIIHWNV

SEQ ID NO: 665 - protein, 486 aa, synthetic construct; identical to SEQ ID NO: 7

SEQ ID NO: 666 - protein, 505 aa, synthetic construct
MDIESKKFIIRYVAIYIRKSRAENMEDLEKHRMVLIDLCKRNNFKYVEYLEVGTSDSIDMRPKICKLLNEVEEGVYDAVCVVEYDRLGRGDLGEQDRIKKAFQKSNTFIITPDKIFDLNDDVDDTYADFKGFFARQEYKMITKRLRQGKKIGARRGQWTNGIPPFPYVYQTYKNKVNKKGLVVDDDKLSIYRDMLEQALKGIDPKKIAENINQRGILTIKGNYWSNVTIQRLLVDETHLGKIISNKTQGDAHKNKRPNAKPYKIIPQCDWVIVENCHEPVKTQEEHDRILTLIHQRNSVPVAGRKQKHALTGLIKCAKCGHNLTFNMTEEKVFVKPCWFIDAFGKKCGNKGISVDILEKFSIDEIKKYNDNYLISFDSEDAEKAEIMQELILEKEITLQKHKRALELVNDAYELGDYTRHEWLLRKEKWQKSIEQLKSEIYELKRQYRSTDKITKEERQKKLSAFLDSITAVTENAQRNDLYRTIINGIIYLRERDTIEIKIDFK

SEQ ID NO: 667 - protein, 466 aa, synthetic construct
MMTRAAIYCRISRDREGAGLGVERQHQDCIALVEARNWTIAETYTDNDLSAYRGKPRPGYRKLLNDITMGLIDTVVAWHTDRLHRSPVELEEYIAACDQHGVPTHTVKAGPLDLATPSGRLVARQLGAVARYEVEHSIERQQRAKLQAATDGRWKGGRRPFGYEADGVTVRPTEAQVVQDATTAILAGGSLRGVAANLNLHGVVTSTGRAWSPTELRKMLLRPRNAGLMEHRGEVVGYATWPPLVDEDRWRAVASVLTDPARRTQTSGARRWLLSGIAWCGVCGAPLRCTLQNSNRAGVPSYTCKASKHVARNAVELEAYVSAVVVERLSRPDAIDLLSASGGTEVSALHTDAAALRERLDELATAYAEGAIDAQQLRQGSERLRSRLAELNVQRADAARGSVLTGIVDADDVAEAWQALDLDRRRAVITALMRITVHRTRKGRPKGWRPGRSYFDPSTIEIAPRA

SEQ ID NO: 668 - protein, 476 aa, synthetic construct
MRAAIYARISADIDGNSVGVDRQMAACQALAKKAKHRVTETFTDNDISAYSGKVRPGFEKLLAAMARSEFDVLIVWHVDRLYRSMKDLERIIDAAESGAVQIQTVESGNIDLTTSAGKMVARILGSVARQESEHHAERRRIANKDRALEGEWRREGSRPFGYLNDGTPLEPEASMIRLAATEILGGKSLHAVAREWNDSGVTTVRGARWTNLHVRRVLTNARVAGLRVHRGEIVGTGKWESLIPETTWRGLVAFLSSPERKNAVSFERRYLLSGVARCGVCKKPLYAAYPHGRDRAMIYVCKSGSHVGRNGADLDEFIERTVVAYLGGEGVGRDLRNAENNVDIAELREKRDALVATKDQLATLLRKGILDMAAVERESAVLTADIEAVNRQMADAVEIHPVAALLAADGEEPGDLDGAKLIERWKAATPDRKGKIIKALLLIEVNPTKRGGRVFDPDSVDVEWVDYSPKAAVSAG

SEQ ID NO: 669 - protein, 497 aa, synthetic construct
MKTGVIYCRYSSDSQTEQSIEGQLRVCNEYAKSNDIVILDTYIDRAMTGTNDNRPDFQRMIKDSAKKSFDVVLVYKFDRFSRNKYETAIHKKTLKDNGVKVISAMEYIPDSPEAIILESMLEGYAEYYSAELSQKVKRGMRETRSKGNFTGGFIIYGYKVENHKVVIDEEKAETVKYIFEQYAIGVYVKDIIKALTSKGIYNRGKPFARNTVYNILKNEKYAGIYRYNGEVFTNIYPQIVPQETYDIVRKKIDSNHYGKRSTEVVYLLRHKMKCGYCGSPVSAECGTAKNGERKRYYKCLGRKNGNGCKKSQARKEVLENYVLENIITQLSNNMDYIVSELMTMQENYIKANSALTRLVKEQRATENSINNIMTAIENGGTSNTAMKRLRELEEKNAELEKQIRIEQSHSAFKLDRKEITDFYKFALEQEPKMLINLLVKEIRLFDDKMIIIYNTPRTISLDESQGFSFYMDNVPYPIYIQNVQEPRMTDFQLIMRI

SEQ ID NO: 670 - protein, 524 aa, synthetic construct
MNFGIYTRKSYYTDTSDSVKMQLEACREYIDRVFDEIDTVTPYEDDGYVRSDIDRPAMNQLREDVADGLLDCVVIYRIDRVCSDMMDFCTFYTFLKERGVKFVTVKDGIDTTTPIGEAMMYLAVIFSGLEIGNDAIRIRDNLNHLAARGFWCGGQPPIGYDIQEIDLGGKKHKTIVTNEEELAYKKELIRIMQENDFSLQQMETYCKNNGIKSVRGSFLSTTQLHQILRSPYCVADTPEVYDYFAEKGCIMDEGSPRELWDGKHGVMVYGRTMQTRVNHKKKHTIAPPENWRISIGYHEPQMSAEEWLALQGFFGRHVFVKELKHETTLLKGILRCKKCGRLLGLSRKKKVDGSVSTWYKCYNRERRGVCDMSQIKAELLDEKVLEIFRSIEHDPATIEKYVKVEKKAAGSGDQLRKNIKKTEEKIDRLTGTLATSAQSSAAKYIVAEIEKLDVELQKLKREEAKLSQEKRRNAAALKNAENKRTEIEALLANFDNFTMEEKNEIAKRVIREAAWDGETLFIML

SEQ ID NO: 671 - protein, 538 aa, synthetic construct
MIKVAIYSRKSRETETGDSIENQIILCKEYCNRNYLGEEIEYIIYEDEGFSGKNTDRPRFQQLMKDIKSKKINMLICYRLDRISRSVADFSSTLEFLQLNNCDFISIKEQFDTSTPMGRAMIYIASVFAQLERETIAERVRDNMLQMAKKGQWLGGNTPFGFESKRIKYLDESLKERTMCTISPVNSDLDIIKRIYNIYIETESTTKTAKRLHTEGVTKNNTIMQSITITRILRSAIYVKSSEKTHEYLRKKSDNIYGEANGNGYLTYAKTTNTLKRSRNNEDKWIYAVSKHKGVIDDDTWLKVQRILDRNKNKDFKRTGTGNNPALLSGIFKCKKCGSNMIVRRTGEYYYYICSSKVHKIGSSCNCKNVRVDQLDNNVISQLKNYSNSLLIEELSNSVAKFESIESNSSNSDNLKKELNSKVDMVNNLIKRISLAPSDDIAEMIMNQISDINKEIKSLKSKLDNIDNIKIKDNIDKQNVLLFIDSLKNFSKNIELFEDPIKRRSLIQTVVKKIIWNDDEYVAEIELLEEVSDEYKKK

SEQ ID NO: 672 - protein, 453 aa, synthetic construct
MQALIYCRISRDRSGEHAGVQRQEADCRELAASLGWDVADVLVDNDVSATKSRPRPAFVRLIDLLSSGAYGGLLFWHPDRAYRRLEDLGSLIEVAKANNVAIRTVKAGEIDLTTASGILQAEILASVAKHETARMAERVKRAKAETLAQGGYRGGPRPFGYESDGMTIRESEAALVREAAAHVLDGGSLRRLTIDWNDRGHVTARGREWRVSTIRHILLTPRVAGLVPINGRSTDDAGKAQWPGIISEDDWRAVVAILRDPARTTTTSYEIAHQGVGGAYLCGVCGATVNTVKSEVGRSYKCSKSTHLSAKKSSVDEFVDELVIGRLSMPDAVEAFAGRGGGDAGALRAERDRLDSALAERVDMLDAGDLSVEQFRRSSGRLREQLAAVDRKLAAESERSPLADLLFADDVAEHWKSLTPAVRSQVIKALMVVRILRFERRGPMSGRIAIEWR

SEQ ID NO: 673 - protein, 622 aa, synthetic construct
MKAAIYIRISTKKQNTDRQYEELKSYANSMGYTIVESYEDQISGFKDEEERHDLNRLKEDAKTEKFDIILFSELSRLSRKTTNILELISYFRDDCKKSLYFQKQNLNVTTDKSDLGSELQLNILATIGSYEIELSTERQMGGKIQKVKKQCWTHGSRPYGYNIDENKYLHINEEEATIIREIYAYYLNNMTSVQIAHLLNSRNIYAPATKNKKQNLWHPNSVCQILRAKRNIGIFEATYHEPDPKNKDKIRKRKNRKIVEEIKYTNKALAIVSDDIFYSANEKIDKNIKNKDTAKKNISLLKGLLTCGHCGSNFFYKKSGRDKDFSYVCYGSRYSFSIGKKKCINPITINAPKMDGLIIYMAKSRLLMRRLIENSDINIKSKEEQLQKNEEIILLQNLSIKKINEEFNQYIKKAIKYGIDDNITEKEHQRIKKQIRQIEENIERIKKENYSLNKQIKILSKDKCITDEMYNGMQLNEMKELFEEYIEKIVLYNTTQWVIVNVCYFDGSNEFSFLRKSARANELLHYNTIIQSVISEKQYIMLLRDYYDTLEIGNRYYYYPYYSNINNDVIYDKEREVFIKFGTKKGKETTEYTISEFIKFIYPKTMKEVTAYEYYYPNQKNE

SEQ ID NO: 674 - protein, 513 aa, synthetic construct
MKDNEIKNVAIYLRKSRDDGDEDILRKHRMALTDFAHKNRWKYELFEEDAISGEFLNKRPIVSQLLDRIENLEFDAILVKALDRLSRGDEAEYGELLRVLRNSDCSIVTPERVYNPSDLNESMVISINGIFAHRELNAIVNRLQEGKKYGAKEGKMTNGKPPYPYYYHKEIIDSDKGQKIIPTVRVDPEKHKIYEKIKELYIAQNMGTERIAFFLNQRGISSPNGKNWTTATVSRLLLHEFHMGVAIYGKTQWKENRAGKIRVVKLPREKWHIGRGDWPIIKTESEHNEILRITQQNLRVPSRAKQGAFPTSGIMFCQKCGYSMRYSLGKLEAKSGKVYNYTKCSHKNPMGKKCEQRGVKMDENFYNTLYNTISKCNTNKRKVLEIAQKSERLRRIEIEIEEVQRKIEDIDKQLKRIKAAYAAGVYTLEELKIEKKDIEVKKKSLLSAYQNLSEEREGMSMLSEKELSKRVENFKEKWANASSEEKNALLKSFIKKIVYNREGNKITLSIEYQ

SEQ ID NO: 675 - protein, 598 aa, synthetic construct
MHQSIKSRTTMPNVDTQTPLAYSYVRFSTARQALGDSLRRQLELTERYCEKKGLRLVRESAYRDLGVSAFRKKNMETGKLAEFIEAVKAGKVPPGSFLIIEQFDRLSRANVNVALRLLMDLIEAGIVVVTLVDEKEWTRDSLSDLADLFTAIIFMARANDESARKSDRLTAVWEQKKKRAADGTATRIVTSEAPRWLRAKADKTGFEPVPDLVESVRRVFEMRIDGAGAVAICSRANRERWPAPGKAPVRKAGETDEDFAQRKEASGQWHLSLVSRILKNRAVLGEYQPRRVDRDDSRNRIPVGEPIRDYYPAIIDETTFLRAQATSLRRGIRPGRRDAQARNWLYGLVKCGECGNSLVRKNKTSAKQPGYARYYCVARVRGLTKCASVGSSQLEGCVSHVVSTWLPNHWRTDTSFDALRARADLLETDIAKFKANIDGLADLASSVTAPSARKTLIERLDREGDALNASEQELARVRAELADHAHLGSDAESIAAFEKAFHEIDALAAGRDGVDGALRLREELARIVQKIVVHQPTGHIEFFIKGRGEPVWLPLDFVNAEPPSEPSAEQLEAAERDIDALRRAMLDLNVASDSAGTL

SEQ ID NO: 676 - protein, 499 aa, synthetic construct
MAIAYSYIRFSSKAQAEGDSLRRQLQKTKEWCRNNDVELSDKNFQDLGISAFKEKTRPSLDDLFTAIQTGSIIEGDYIILENLDRLSRQGIDHTQEMLRKILRSGVNVVDLTNGLELNKTSLNDLVSVIRIALAADLAYQESKKKSERVLAAKATQRKLVREGKVINKRLPFWVTNSDGYQLNDKAQIVRDIIKQRTSGVGFHRIAMNLNNVYEAPKAKHWSDTTIRDIVKSRALYGSMVDKDGEVENVFPALISFTEWQAIQAEHVSSAGGYTQHNHLARLVKCECGSAMSKKIQKSKTKTKTHEYNTWKCIAATSGGCGHKGVIRDLDLDVFKSLNHLKINKSKSSSLLNKINQQIEKKTLRQQELEQALLEDDAPIAALTKAIKKTNEELKQLRSERDLLSVRTDSKLLIELQNNAVEFNIELRKLIEKIVVIPVSSNQFRIKIHQHNGHIVNCVKTRTSQRSEWTRLFGKTEEILKIATEDDGIPYTDWGETDEL

SEQ ID NO: 677 - protein, 565 aa, synthetic construct
MPRIRKTQNQPTISRIVWRIAVYIRLSKDDGNDESLSVTNQRKIITEYIEEFFEGEYIIVDVYADDGLTGTDYERPEFQRLIHDVEAGTVNCIICKTLSRAFRNYSDQGYFLEKVFPLYGVRFISIGDPSLDTFKNPDAVQGMEVPITGLMNDRYAARTSNDIRRTFNTKRRKGEFIGAFAPYGYMKDPEDKNAFVVDEEAAEVVRNIFHWFVDEGMSKLGITKKLTEMGIPTPTAYKHSKGLNLQTPRISKNDGMWGITTVCTILKNEMYIGNMVQGKQRVISYKVHEKIAPPKEEWFIVENTHEAIIDRETFDKAQRLQERDTRTAPGKKQLYLFSGLLRCADCQRSMTRKTCNKPNKTYVYYVCSTYVFKSKDKCTRHVIKEEVLHEAVLKAVQAQISLVGDMAEVVKEINNTSTVCTQSKRLQQLLKDRSKELEKLTCVTDNLYMDWKCGDITRAEYVRMKAKFEQQAEQVKGIIANLQTEIQLSEKGVGNDNPYLTTFLKHENVKSLDRGLLVELIDTIYVHENNEITIQFNFADQHKRIVEFIENNQHNLELIKSNNAV

SEQ ID NO: 678 - protein, 512 aa, synthetic construct
MTTQRAGIYARISRDDQGERLGVQRQLDACRDLAARMGYQVVDEYVDNDLSAMKARRRPEYERLTADIEAGHLDVVVVWDHDRLLRQTRELERFIDLCDPRGVPTLTVTSGHLDLSTPTGRAIAKTRGAWAQHESEHKAERIRAQKAQAARAGKHIGGPAPWGWRRVEHKVLSNGRHEGGRFEVDPFAGRMIQAGTAMILKGHTLGEVARMWAAEGVRSRTGRTLTTSQVKERLIRPRNAGLLTFHGETVSDQWHPIVPLEDFRAVEQMLTAPERRRTSTVKHRYLLSGVLYCHCGRVMHGLRHSTRGTRYRCSVQFEHGTDRTGHTTRRMEPMDEYVRAAVAAFLFDPVNLKALADAYVPRPDPASSGEAAELVALTDRKNALTRLFAQGALSEAQLIEGTAELNAQVDRLRAAVRRRTRSAAVGDIVAGGDPAGAFLAAPLPVQREVLRALLWVEVFPASKAVAGRFESETVRLHWRHAPDFREPVRRPPQKMGPVTGIGEGMDASDAAP

SEQ ID NO: 679 - protein, 478 aa, synthetic construct
MRCAIYARVSTEEQAVEGYSISAQKKKLKAYCDAQDWDVVGYYVDEGISAKNTNRPELKRMIEHIEKGLIDCVLVHRLDRLTRSVLDLYTLLDVFEEYDCKFKSATEVYDTTTAIGRLFITIIAALAQWERENIGERVRVGQQEKVRQGKYTSPRKPYGYNADHKEGILTIIEEEAKVVRSIYNDYLKGHSATRISKRLNATKTAGRDYWNEKAVMYILENPLYIGTLRWRKETEHYFEVPNSVPAIIEEEMFNSVQILRESRQESHPRSQYGSYIFSGILKCPRCGRSLVGNYVVSKKKDGTKIKYKHYYCKGRKLNVCTMGNMSERKLEQAIIPHILSFYIDATDEDVKLENSNTENEIEQIKSELKIIEKRRKKWQYAWANDHLKDEEFTEFMQEENENEKVLTEELYKLKPAENKKLQNEELKNILKDIKLNWANLNDEEKKIFMQIILKKLVIERSDKLHAYKLEIVEMEFNY

SEQ ID NO: 680 - protein, 536 aa, synthetic construct
MLKAAIYVRVSTTKDSQKDSPEHQLAACKYYAEDMGWETSEDIIYEDRESGTNIIDRQAIQRVVRDAQSGTFQVIIFAALSRFARDIGDSINLKRKLVDALHIRLISIDDHYDSNSDGEMLFSIISSINQSVSEQISRSSRRGKRESARKGNFVGSRAPFGYKRVVQNGMKVLVPDEEKLNTVHTIFQLYTANKMGEKAIVAYLNDKGIPSPKNGIWGITTIQRILQNEAYIGKNRFSKYETKTVYTNVNDMSERKKVQVQRPKSDWCYANDEQTHQGIIEEDIFQLAQSLRLERGGGERGGIRQKINIFAGIIKCAHCGSSIVSMKSKSKKTDREGREYRYLICSKRRRQGEVGCSNDFWLPYYPFRDDLIHSLSNTLRNITTAEELLEKHKGLIQINHTDLENELKKLHKRIADNRKCLFELRREKMSGGFHDEQQYNMEKAIYEQEIIQLEKRLTEANEEKRKQTDLTELYEQVMDMLDELLDLDFDSFDEMQLILKKLLSEIKVSRDGEIEVVTTFGLSLTELETASKEHNE

SEQ ID NO: 681 - protein, 519 aa, synthetic construct
MGLDRPAAGDPTDLVDVYLRRSKKREDLATLRGHLRDVVRWCRSESLGIRHVWFEQRSASKAQVRRDEFENAKAAVLAGRSKTLAVWKTDRLDRRGMGAVGGLLDDLDRRRARLVSISEGLDSSKGGRMVFAILSERAREEAKDIALRVQIGLDSHRIIGRAPGGRPPYGVMHVGNGKVGPNPKEYPTARAIAEALLQGQAGTAIAHRMTAEGKRTRTGRHWSANAISRMAQSPLWAGLVPYRERHTDEYGNPIDKWGWKAEPLIGPDGHPVSCGTGVVSLTEWYAIRTYFNTRTVRGVLGRHGAKQAGKLLTGIMKCPHCRIGVVSGGESYRCRTRMEGGASACPGTRTKADRADWEISQMWVGHVSALEPHDPVLHEIANRWLSYQDPEREERRKHVTAALEDAERRSAELDDAYYVAGRMKPDRYAALSSALAEQIDALRAELKELRRQADLTPLLDGVLLAEAWQAAELHDKRMLLRCAIADLTLLPSTGQGDRTPMIDRLAVEWVSPAVAPSED

SEQ ID NO: 682 - protein, 558 aa, synthetic construct
MISTNNRTSYCYARVSSETQGSGYGMSRQADSLLDYVKNYEDKEKLGFLLNCDQIVWLRAEGVSAFKGKNLADGSVLKSFITGVITGEIINACLLIENVDRFSRQNPIEAAQLFLSLINADCPIIEVENDIVHHKHSDLTLITAGLIRANKESARKQKLSQKNWDKRFDQALKKNDIVSGNHPNWLTIIDNKYEIVETDAMTYRKIFELFLNNYGPSLIRDYLVEQNLQANGRLLRSNEISRILRDRRLTGQYRSAKVNSRKVLDGQSIFPVIVQPADFNAVQNMLNTSVYSTHKQKIGKSSNNLFSTIALCEKCGSALTVNYASKNKSLYYYRCSASILRNKTPCDALGMRYDYIEKAIIQNIRHVDFSVNKRNDNNVQKRLNLLLKDLQHKTAYRDELLEDINALEIPDPSDRRILKNVIKKIAEIETEINNVRSIDTDTTNVDSVRSIISDEIFNRDNQELRIDLNSRLCKVLKRVEIERLSGVDIIIVNLNYFISDNTQFIFIDASNGRVTLQGYKDNKTKISYFEKDGKHMVLDYENMIYTNENGELINPLEW

SEQ ID NO: 683 - protein, 557 aa, synthetic construct
MASEGKVAAAGKVRCAIYTRKSTDEGLEQEFNSLDAQFEACAAYVMSQRHEGWELVKERYDDGGFSGGTMERPGLQRLLSDVAAGKVQVIVLYKIDRLTRSLSDFSRIVEVLDEAGASFVSVTQSFNTTTSMGRLMLNVLLSFAQFEREVTGERIRDKIAASKKKGMWMGGPVPLGYEVQDRKLVINELEAATVRHIFERYVELGTGQLLLEELREQGIRTKRRAYRDGSVRGDIPFIRGSLFHLLKNRIYRGEIVHMGKANPGEHEAIIDEELWERVQLRIAENTVERKLRRTSKEASLLAGFIFDGLGRRMSPSHTVRKVKRYRYYVTHAAEIVDETPAWRFPAHDIEKNVVGKLADFLSDQRTIRKLVGTNDAERLAVAITHCKRTAEQLQSSTYHRRTKVPALIAKVEVRDDAIRIALCPSSFSNLLGMEVDPQRLPCLTAPVCRVRKGKEIKLVIGDGTRTHRDETLVSLLRESRAIREEVLSAPDLTIAEVAASSGRCRKRMSRLFRLSWIAPEIIDAILAGKQPPALNAKALLTTDLPIDWSDQKAALGF

SEQ ID NO: 684 - protein, 589 aa, synthetic construct
MPRAYNYTRFSHPSQALGQSEQRQIELCEQYCRVHGLTLVRDSEYTFLDRGRSAFLGAHLDDGAELSRFLKLVEDGTIPAGSWLICESLDRLSRQDSWTAMKLLGGIVESGITVVTLNNGEVFADMKDARKLIMAVLDSSRANSESSHKSSRLRQAYQKKRDAASDGKAVFTKQVPMWLKLKADRSGYDLVPEFVETVRMIFDLTITHGKNKVAQLLNEAGRPTFKPSVNGWGTSAVSHVLNNRAVLGEFQPMSKLDDPKRRKRKPVGEPIKKYFPAIIDETTYYRAQDAVAGRRTAKATKQSVKFNVWQKVARCIHCGSPMHMVNKGRAPKGQTYIECSIGRKGLCESHKLIRLDHSEQVFRAILACLDSMSLVRDSGGKLAKDLAAINGRIAEQEAKLSKAVAAFDAEPSPDIAAAVRRMRETLTELTNQREHTQGELAAEDAIDYKEFMRRLDLESPEGRAAANALLQRLKVLVFADRGEDARNPSSSYVVTQDGEPRFAVAYADGKAGYRKLSPWKHARPWMIQRGNPHGPLLPLHMSAATALKHAGPVHFEPPKEAGSRAYEIEEDADARRQADADEDYWPIQE

SEQ ID NO: 685 - protein, 508 aa, synthetic construct
MLNALYLRKSRQDSKDETIQETLAKHERALWKLINELNIDKNSVVVFKEVVSGDSISQRPEMIKLLDGVCEGIFENVIVMDVQRLARGDTIDQGQILRAFALHNTKIITPGKVINLENEYDEEFFEYDLFVGRREYKKITARLKRGKLQAVQEGSYQGSIAPYGYKKVVVNKTHTLEIVEEEAKIIRKIFDLFLYENLGTTNIAKYLNDLGVKPRNCNQWTPAIVRGKLTNNVYCGMIKWNQRKIVKVYKNKEIVSTRPLNKEPLIVKGLHQPIVSVEEFNRVQSLFKSRTSNKVPEKYNLKNPLAGLIICKDCGHKMVRRPYKNGRMETILCSRLNCHNVSCDLDILEDRVFKSIQEHLKNYKIFIKDYEKLYEEKVSNSKSLINLYNKKLEQNKQQEMKICELLETGIYNLDIYNQRIEILKNEREEILLKIKKLKQELKENPTKTKKNSIPILEKAIQCYWDCTPQEKNDILKSIILKCIYKKEKSGRWNPEAIDNFELDIFFRI

SEQ ID NO: 686 - protein, 501 aa, synthetic construct
MDFSTYSGIYAYIRHSKESQSEGDSVDRQDSLASYWEKTHNVPVNYLAIDAGKSAYSAENIATGSLGQFIADLESNNLPSSSLLLVEGFDRLTRQQLMTALALLQRIFATGAHVYTLEDNNLFTADSLNDLPTMFGILMKIGRANEESATKSRRIKESFARRDQQMIAKTPINYRHLPHWLEYKEGQDKYHINEHADTIRLLFSLYLEGHGVTHITNTLNDKGLLRQGKTEWTTANVSSQLGSRLVLGEWKGHEGVYPTIVSEHDFNAVQAMKRKGTGRRANRLTSVNLFIASIARCSCGKPLHVIRPRGVKRLVCSGTRQGKTGCPFGYKLYNVDAIEMALGLWATETIGTDPEDYTSKLSHLRNALAANEQEQQAHRDALVGLADAIAELGYTQALKDRYKSVEGDLATCIQRAETISLEVQQLERPQTDNADTLAHWHKHADDSDYRRRMLQLMETKGVEFIMDNGKVTLHYQDRSWFLQDGLFFTDATVAKFLNEGD

SEQ ID NO: 687 - protein, 488 aa, synthetic construct
MRIAIYTRKSVYVENSESIKTQINLCKTYFKGDNEYEIFEDEGYSGKNINRPAFKRLILECKMNKFDALICYRLDRISRNVADFSSTLELLQKYNVTFISIKEQFDTSTPMGRAMIYIASVFAQLERETIAERVKDNMLQLARKGYYTGGTVPKGCKIIKENKKSCLQIIDSDLIHSYFNSYLDNGSLFLGYKFLKEKGITISREGYRKVLRNPIYVKSSKEVTNYLKSKGYEVIGQVDNKSGYMTYGKINNTPIAIVGKHIGVLDSNIWLKVQMQLDERKEQFKNTSEVNFLSSVLKCPYCGGYYQLSQSNKVRYYVCQNRINRTKTGIDKSKEKCKNKKYIKADLLEEKISQFLKQLENKDIFKKLFSDPKEGRESNISNLEKQLNKNNNAINGLVEKVALLSTEASKIFIEKIEELTQRNNEIKNKIEIEKLLEMQKKANDTSSEFIYNKIIEFNKLKSTKEKNRILKLIFTNLQYDPYKNKITI

SEQ ID NO: 688 - protein, 587 aa, synthetic construct
MTPKVYPYHRYSTKNQRKGTSIKRQRAFAEKVATQLNLTLGDSFIDDGQSGFHGKNSEDGGALFDFIAKAKSGAIPRGSVLAVESWDRFSRQDFRKPLKRLLDLLDEDIKVAVGTGSEYQLFEKQADNDADAEFMGFSTLLVAQMEMFRAWSESKRKSEMQIKSYYHTIDNHNSTGQTVRKIPGHYPKWIVSDKNGFQLHEDSKYLEQAIELYLSGMSYEDIAGKLKGKPCFWTNGWNAPALRKAFISPQLHGDRPVEVQGETKTAKEYFPALITKDKFNELQRAIERRKGHQGQQTFVSIVTGGGWLFCGFCGSPMSGQTQSFRESSRYTGIKLGDHTFDYSKVKCGSKKSDCICGMSHTTTIEKILLEFCADKANMSFLESSNSYDSEIIQVKNEIEQCSLRLTNLSNAIADFGYTTETQAVFKATTKQKSELEEKLAGYLSLEQKQTQVTGDTLERMLTLYDENTDESRQTISEILSSTIKKCSLITWKTRDSSLYETKINKFGKNKGKRTKEIKLERVREYPLCMELTTDARLPIKGEVCVVLEFVSGAKRLVYADDKGNWTMCYDGGLDRYYTRIDDKIIRT

SEQ ID NO: 689 - protein, 491 aa, synthetic construct
MKKVNKKIKAIGYIRQSDEREDKEDISEQTQLSKIQQYCDFNDWDLVEVFKDIDYSGFRIKYTKRPGLMQAIEYIKNNPVQKLVIFNLSRLTRRRKDFLLIQESLNKLEVDICSTAEQLDFGSPTGRLVANILVNFNEYYSDNLSDVTMDNKKTNAEKGRWNGGPAPFGLKKDGDSFTADGDKADAIRLAFRMAKDGKGPYLIAKKLNELSVLTETGRSWSPRRIRYVLTNPTYAGMQKWQGKLYPLKSCEKLVEWDDFQYIQDTLFGKEKVWKGKERQLLSSLLRCPVCGGKMHARFSTGKKSRRYVCNKKNTLGHCPSPNYDLPTLDEAVVQAIGAMAKKRYEASELILELNESQEDNTNTLKNLRDEYNRLDAAKQKIFDDYYINNKLTEDQFNTLMTRYEKRQKEIDEALQKIPLPQSKSYGHYDDIIGEFTEALEVLPKQEKRKSIELLIDRIIPGEPTKVIFKWGDEMEIKPREMKKYNQKVYFY

SEQ ID NO: 690 - protein, 498 aa, synthetic construct
MSRRKVALYIRKSREDAVMSDKEETLQTQEQTLIRLAESRGYKQYDIFKEIESSIRYDRPELIKLMRGIEQGMYSKLLIIHIDRLGRDVGLLDDLKKLCIANDVIIETPDSTINFKDDNHDLMYGFSSVLADFEYKRIRHRLATGKINTVAIRNRWIGSQAPYGYYYCKEEKILKPHPEQSVVFRNMVAMALEGSTFSEIANKLNDLGQFTQHGNRWTAGRIQKLLKNRTYLGEAEYNSTRLNQRAVAKNCHEPLMSYEEYDTIHKLSASRRNYDSRDWGNIKTPLDNLVYCGKCHRKMSIQISKKYSKKRGHWHFYQARRCIHYNPDGTRCTNSGCKIDIIEAVVLEQLEQYKSSLIEKLKSIRENDTSGAEADIRKRLEQLKEDAKKQDVRLKRLTDLYLDAMMDKEEYEQRRKDILEESKAISSEIGYLEAKLVNLDVSNLETKYQKMIDLIDNYKDMPLEEKNKMMRLLIARIELTKENTYSQPKIDIWFMDAV

SEQ ID NO: 691 - protein, 548 aa, synthetic construct
MPLGDRGRVVSFGCTPLVFGLGYDADTSVRGRRGFVRKFDVQRDCGPTCGVSCGLISYARISADTKKDEHGVEGQHAQNQDTALYHGERIVCKLTDNDLSISAGKDDVYREDFEKLIKALVHGKCPCHGYVIHGVVVTFQDRIARTFANWERFTDALTYHDGRTYIQENSRKDPYSEGFVWEGAAGMVGAKQEPKRISKRLRNSHRNRAAAGKPVGGSRPFGWSPDRKSLDPSEADWAIKAIRGFAAGVTLYSLVRDMQNAGVKSTKGNEWTTDSLRKFLRNPRMCGWRELNGELVYGSDGEPVVGEWDTLVPPEIYLAVKARLQSRRKAHIERGGSVGVPLAGDYSARRYLLTGYLRCGKEYTGSQCLTKFRASPYSRSIGVPGHQYHCHSKARGGCGGNYRNGERLDLYVVEAVLAQLERYASEDTSPSPWGREDEWERALANRASLIAAYANGAGSIAPESFYDVLLPGAEAAIKELRADRDRHNAAQAQRSALPADVRGEWERNTDLGWRRAVIGRAVSAVIVRPLGHRWAPWEGSVEIIWRQR

SEQ ID NO: 692 - protein, 458 aa, synthetic construct
MKKAGIYIRVSTPEQEKNGYSLNAQEEKLKSFALAKDYEVKKVYRDGGFSGAKLERPAMLEMIDDIENNRLDLVLVYKLDRLSRSQKNTMYLIEDVFLKNNVDFISMQESFDTTTSFGRAMIGILSVFAQLERDNIRERMTLGRMERIKRGFYMGGGKVSFGYRYNQESNVLEIDEGEATAVRRMFELFLGGNSIYSLINTLKKEFPHYEKTFYDASVRRRLANEHYIGNSQYDGKIYVNTHEPIIDDLTFNQAQLMLSTRSHGNAFKHKYLFSGMITCKKCGKSYNGFESVCGKYSNKYYRCSSTTYKFKKKNGWECSGKRFRCEDVDKYILDKIKSIATDQVVSKKSKSTSLPIKKEIDKLKAQQAKLLDLYLDDRIDTNVLDEKSKHIKDLLEKLNKQLKEKPAIEKKVFDESVDKLANNFESLSFEQQRILIGNVIEKIEVVGGDMNVYFFDTK

SEQ ID NO: 693 - protein, 458 aa, synthetic construct
MHCVIYTRISLDRTGEELAVTRQEQECRALAERQGMEVTEVYSDNDISATSGKVRPAFEAMLARQPEAIVAWHQDRLLRLTRDLERVISLNVPVYTVTAGTLDLTTPAGRAVARTVAAWSQYEGEQKATRQVAANAQRAANGVHTGRVGYGYRREGTALVMHEDEAATIRAAVRRVLDGESLRLICKELDARQVPTPGRGERWNTTTLKQLLLRPSLAGLTVHRGKVVGSAPADAPRVIDEDTHERIKAVLTDPARRSGTPGRAPKYLLGGIARCGRCGGVMARAGGRMTRQPNGNEKRQPPSYVCTECHRVRRKQADVDALVEGVMVGRLQMPDAAELFATGDADALQEARDSIAALDARMSNAADLYAAGDIDAGQLTRITERLRADRAQATTAVDAALPAAVPAELMGQAAAATWAALSMDSKRAVLTALVTITIMPSGSGKTFDPDTVRIGWRS

SEQ ID NO: 694 - protein, 471 aa, synthetic construct
MKGGNCKEYTDKGYSGKNTDRPKFQELVRDIKRGLIAKVVVYKLDRISRSILDFANMMELFQQYNVEFVSSTEKFDTSTPMGRAMLNICIVFAQLERETIQKRVTDAYYSRSQRGFKMGGTAPYGFHTEPIKMDGINTKKLVVNPDEAANIRLMFEMYAQPTTSYGDITRYFAEQGILFNGKELIRPTLAQMLRNPVYVQADLDVYEFFKSQGTVIVNDAADFTGMNGCYLYQGRDVKPSKKNDLKDQMLVLAPHEGIVPSDIWLTCRKKLMNNMKIQSARKATHTWLAGKIKCGNCGYALMSINNPVGKQYLRCTKRLDNKSCAGCGKIITSELEAVVYQQMVKKLEKHKTLTGRKKAAKANPKIAALQVELAHVDGEIKKLVDSLTSANNVLLSYVNVKIAELDGRKQELLARIAELTVEAISPEQVSQISGYLDTWENVSFDDKRRVVDLMITTIAATSDSLNITWKI

SEQ ID NO: 695 - protein, 401 aa, synthetic construct
MRVALMADLAWKESEKKSQRLLETKGQKRLRAIEHNEAQARKLPFWIDYNKATSKYQFNELVEIVRRIVSERLSGKSDRTIINGLNNDGIMTPRGSRWYENSIRNIYTHKAVYGAYQTMRTVRDDPTDHTTAKTVLDKLVLDHYPAIMSPEDFESIQPIAGVRSGNHGSHNHLRRITRCMRCGEPIGKKLSKHSNSNGNAYVQWFCMGIKNTGKLKCDQPTFKDLDQILFRITKHLKRVRSSSIDAEQKVIQQSIAQKEMALSEIQQAILGGVGITALIATSIELEKEIDNLRSEITIDYGDKDYDLLSESVGDAVAWNILAVKLIKSINVDYITNPKRIGMGKDHGSYRVVINQSNGYTISAVVSGVDKIDYKDLNIIMSDTHDIASISPNLHEWELDQG

SEQ ID NO: 696 - protein, 489 aa, synthetic construct
MLAAIYLRLSRNEEQKDVDEVLLNHKNALIKLANQHNLNYIIYQEISSGVNTDREQLNLLLKKIHEFDYLIIMDIDRLSRDNAHAEQIKQVLILNDIKILTPQGKIDLSQETNEMLFSFQAVLANFEYKQIKKRLSRGRLAAAEQGKWVMSNKTPLGYRKNSEKKLEIIEEEAKIIRLIFDKSFERVSVNEIARQLNRLNWRSRQGKILTTSHISQLRTNPVYYGAIQARRRIHNKIIDEVFIEDAHEAIITKEQFFAVQTILENNKNVYFQNRKEVRRLQNLIYCNCCGRKRYIQKDNSKIDFIKSCSNKISNNQCKDRGYKYQLVEEFVLKSIKEKKIELENALKILYSQKTIELEQRLTTELVSLIKQKDKIEKRQNNVREMRMDGEITKKEYEELKNELIGQMNQMNEQIELYQIQIENVRNEKDESQKIEKIIETLDNLEVIDPEICNQFLKTFINKIYFSSNMDSSHDTTRSKEIATIKIEWF

SEQ ID NO: 697 - protein, 580 aa, synthetic construct
MEKRRIVFYGRVSTQSDEQLSAFDNQMVWYKQLLALHPEWTVVGEYEDAGVTGTSVRKRKGFQQMLDDGIKFHKYDLIVTRETKRFARNTVDALSYVRLLKQHGIEVYFVNDGIWTISDNDGELRLSIMATIAQEESRKTSENVRAGQRISRQKGVLRGSGNILGYRRVGRNQYEIDTEQAIIVKKIFKWYLGGDGIRTIKRKLEEHGYKTATGKSHWQFQVIDNILSNPFYTGRQRQLEKVSDGYLTQNRVKNSPDKIEYIQGDYEAIISEEAFEEVKRLRQLRYNKMNNKGKKDSKSVWCGKYLCGCGCGTVRRIASGNEYIFICHSQHMNGIKVKSGITDTEDTCSLRTILEWKLDMIAWHVINDVWGSSKTDITQALKIIEECYREESTLSHLEIRTIQDNIDKLEKRKRGLFDMRADGEITKEEYAAKREEYDMEIQKLNISIAEAETSRVASADYHKKINSIKEALEKILDLSKPKLNRDVVDGFVWKLVHISDNEFDMYLSMGNDNFGDVGAEEKVIKYKVFESSNPRREERVKCTKLKSIRLTYDDAVRYRTMSGKRVLKHKWEDLEVNIYI

SEQ ID NO: 698 - protein, 490 aa, synthetic construct
MKTAVSYIRFSDSKQIGNSSVARQTDMLMAWLKQNPDFSLYKQKYSDLALSGFHGRHLENGLGQLLHAVETEQIPNDAYLICEAWDRIGRLESFVMLSLIDNLIKKGMTIVTLQDNMTYNSDTLRAGSGQLYGLIAKIEQAHLYSKSLSERIKKSWVKKKGDAQAGKGIKMFTPTWLTSTGALKSELHLRAVNTMFNLYLQGKGQVIIARTIREQFSEIYPKILPKTVKKTLSNKMVIGYWEDIPHCIEPVISEPLFYQVQKLMHQRSFQPKVTPRGHKFAGILKCACCGNNLSFSWSRPQQYSRCNLRNRTGQCQNAGQIPYSVFEWVYNDLFECIKVLINQYEQKTTKTDEFLQTQYKLREAKKKYLTLKDLLASSPSIAIADIVATEEANISELEFQLEILTPNTMDSDFYFEEDLIDFEDSEKVIGMLKLIDFKILQNGNKLTTMIDDMTYEYTYHTNRNRKNYTKQFNLLTDEFVKVSYLIDKVK

SEQ ID NO: 699 - protein, 562 aa, synthetic construct
MARKSRKNLPQPEQAAVSVLLPELEEAKIPAAIYGRLSVEDEEKEESMETQIALVQDYISRSRELSYVDTYFDNGFTGTNFKRPAFTRLMNDVRQKKIKCIVVKDLSRFGRNYLEAGYYIETVFPFLGVRLIAVTDNFDSTRKEDMESLALPIRNMVNAMYAKDISKKIWTSLQRKKEAGYAVGNDAPYGYIRNPMTKRNEIDPEAAFYVQLIFQWELMGVPIFEIARRMTLLQVPTPREWHRKMVEGKEVLTCKKWGVTTIRHILENQTYVGDTINNKSTQKLFAGQNKHDLPKEQWYVAKNTHPAIIARDDFEKVQKVLNKNREVFQTVRAKSEQIRAEYQNDLAGMVFCADCGRQMEFERLPHGAEESKKVCYYICKARQADDKCIGHQIPEKLLKALIMDQLHLFIVQLSDKRKVLEELQKIEDVQNPVYRAKGEIMSLTDKVSQMAKKREQLYADYVAGVVDSEDYQLIREDYSRQYNSLRAALQEAENKKVQVEQQIKEYLNMASNLEEHLDNFEFDIQLVKSIVQRIEVSADKRIRIIFGFRDIFAEVEKESAEK

SEQ ID NO: 700 - protein, 551 aa, synthetic construct
MVNFTNNKCTIYCRVSSDQDEQVNSIKNQTSGLIDYAKQNNMIIADSGVFCRRNQESEPFRGYIDEGFSGAQSAKYRRAFQQMIIDSKMGLFKTILTKSVARFGRNVKDMLITIDELEKHGVGVWFEDIKAYSLNGADKIRIQLFATLAEEESRAKSDSVQWAKKQAARKGIWAGREPYGYDIQKGKLVINEYEKNIVIMIFDMYLKKGYGVNKIAKALETELKVPGKRGGRWTGSHVAGILQNSVYTGHTTLHRTRKSNINLGLIEKIPESDQIKFDDESLRIITDETFQLAENERNRRPKMKDCEKGIDTRYSNAHLFSNLIYCSNCGGSMRKKVQKSTRTTHHYYYCRNHEIYGNDICKYRNLQREEELLEWVKEEFRTFISNTADHEFNFKLLLETKYESEDFDVLIKEAKLKLSEVENEKEVNFRLLSKQIIDDEEFGIRNTAIKLEIGKLKSAINRYSNINKEIDMLHAEYKNFIKSLSEIDLDNLDNVTLRKFISGISVATMWIPGQGDEEQTIRSINWNFMEWDQLDIINDHVKKFVLDKQPN

SEQ ID NO: 701 - protein, 509 aa, synthetic construct
MVQRKQAISYQRFSSARQRNNSSLDRQSDSIKHWLKQNPDVDLIDQYVDEAMSGWSGKHIEQGSLGKLLQAIEEGIVQAETLILVEHFSRLSRQNIDKTEELLRKIWQHGITIVTIRDNGLYPPSTINDMPLRIRLIVEIEQAFKESEWRSAKVKGSYVKREKDAKNGVTPRMRRPFWLNKDGTLNDHHLVIKDIFNWYMEGLGQQRIIVKLKEKYQSVPSVQKMNPQTVMRWLTSDIVRGLWRGCKVYEAAVDDTLYFNVQTVHNSRMYHNVKPDRNWPLSGLLQCGVCGRGMSIQKSKDSLPVIRCSSKQRDQSCQRKTTFPYALVHLYMFNTVRKRASRLYTQKTVTKENALRLGHIDNDLVKLRKQIKEEKQLYDEASSEGKSGRLILKIMLETDERIQDLERERDSIQSSIEASNNLFISDEANNLVLTPRNFNLEMHKLGFKIVVGEYSLNTEGLSDKAPEWQYLGYSRKKRAYEWEVLGKTYFMPTASFNEDVLMLEDKEEI

SEQ ID NO: 702 - protein, 638 aa, synthetic construct
MKPKLYSYVRFSSVKQREGNSLERQQDTALKIATRYNLELDTTAFHDLGMSAFKGKNAHEGKLSEFIKQIGVKVPVGSWLVVENLDRISRDDAWSALDIFKSILSKGIVVVTGMDEKVYKYADVKNNPTDLIISLLMFTRAHDESLTKKNRVEAQARSLIRHNLTREPGTPAKAIESVGQNVWWVDTKSGYVTPHSIYFAAAQKIIELKQNGETLLGIQRYLNEHYTAPKKRVYKDKTGQALTPKTEQWGKHLIRTFLNPTVHGQKIFTLDKRDESGAIIYDSESDEPLKETFIIPDYYPALMSEVDYLTLSKLDRHRAVTRSSSTYPGGNPEPEIPLLSGIGILFCGKCGSFMFKSGSSENKYRYICGSKIVQGKPCGKKGFTSYQLEHTVLQLIADHVWNNHQEDKTAWYESEIEKASEAVKKLLKLATLTDNIEELADQINANKQKKITLEKEFQQYKISRSEIQTTGWDQFRHFDVHDTKNPERKRIRLKVKQAIKRIDCYDIDGRHSHFEVTFADETKQRIVIKFNRNRSPGISYVEAQTVNDHDLLKMQGLVLHSFIDELISPEKFAQHIKDKHEVSILNPTFITELEDGVTRDEDSGMAIRVDGITSKSYATVNGIKYEINSLEDLEKLSQ

SEQ ID NO: 703 - protein, 533 aa, synthetic construct
MIKIAIYSRKSVFTGKGESIENQIELCKNYCNTYVNSGSNLEYIIYEDEGFSGKNTNRPEFQHMIDDIKKNKIDTLICYRLDRISRNVADFSSTLELLQKYNVNFISIKERFDTSTPLGRAMIYIASVFAQLERETIAERVRDNMIQLAKSGRWLGGNIPYGFNIARKTYISDFKEKEFSILSPNKKELETVNFVYSYYIKTHSIRQVTRLLNVNSIIGKNGGSFDLTQIRRMLRNPLYVISDDKSHEYLIKKGLNVFGSPNGNGYITYNKSNQKNISADSNQWIVAVSNHKGIITSDNWLKVQHQLDNNKSKMPRIGTGNNHSLFSGILKCKKCGSNMIVKFSGKNKNNIPYEYYVCSGKQNKYLNKCTTKNIRVDKLDKLLTRKLKIHDKTALMKTLRDSIDNICCDFKNNQISSIEYEIHENKVSMDNLIKQLTKSASSTVSDRLMNEINLLDKNIVRLKKHLETIELEQSHDKKTNIDIKNIINVLNSFSDTIEYIDDTAQKRFLIQTLIKSAVWDSDNNNVEIIFNTH

SEQ ID NO: 704 - protein, 498 aa, synthetic construct
MIKQHNKYDVLNYIKNVGIYIRRSRGDIEEDLVKHKKVIDEFVAERKWKFVEYKEIGTGSSISERIEIKQLLKDVEEGLFDAVIVFDYDRLGRGSATDEETIQKTFRLSDTIVISMNPFELYDFNNESDEEMIDFKGFLARREYKLISKRLQMGKKIGARMGNWVFSTTPYGYDYNPELKGLVINQEESNIFRRMLDAYISGDSLNKIATDLNTDNIPSPRGKIWNGNTIKNILTNESYLGWIVSNKTSGVRDSQNPDKIKKPFKEHPRDEWIIVKNCHEPLMTEDEINEVKYILSQKTRHRSGNNVNSLSGIVKCAKCEKTLTIQKNKSSILLKKCSNCGNMGGEAYLVEDLIKHQLKMVKKVLVEKKKKQKSDNLSNNIDSQVESINTQIKKQQQAIENIEEAFEDGLYDVEKTKEKLMKRRNKISELEDQKKYLLSKKKKSNKKENKIKAIEKFYSEIDQASNPSDINKLYKTVIDKVEWLRKDKDNINVKIYFK

SEQ ID NO: 705 - protein, 649 aa, synthetic construct
MLGIYARISREKDDGKDRSINDQILSGKELAAELGLKYDTYIDEGLSGMLDIEERPGLMQLIEDILNKKITHVFAYDQSRLERNKDVWSKLYSIFQDKRIKLSFKGVLEFDFESDENYLFSHITSLMNNFYTKVASRKIKSVLSRNIQAGKAHAIPPYGYGKDNNGYLIVDENEKNIVKQIYDSSLKGIGLDSIAYTLNEANVPTRYNKINTGTYTVRNKHTGEERKLEKSKTKWRGGTIRNIITNPIYKGTRIWKGQSYSAPSIISAEHWDEVNSNLSKNANNTGKKVLHRYLLKGVLRCGKCGRNMVGRSRVNKKDHYYQCSSKRYKGESCGNKSINIDKIEGIIWSRFFKGNDLLSLLQNELIKDDNKVELLNKELKKLHKKIENEKKEKANLINAVAKGLLKDEEIITNKRQIDRKVKETETLIKDIEKQIYNAKNSDKLVTNYITEFERYTDNLSFLEKKEIINKYIKSISVLSPYTNANTYTLLIKFKINLKDEIYIYEKSRNFLMSYSDWTVVDSKFFNSESSKAISIVDISIIKRIRFNPETNTWYTPPYHITDDGMINFHPNSIIPYHNFPKNTIVWTKESICDFYKQYPDLLCKESGVSTISKDETQEYYNQMKNDYQQFKNKPLIEWLDFIEDRSKSS

SEQ ID NO: 706 - protein, 560 aa, synthetic construct
MSNQQKLRCAVYTRKSTEEGLEQEFNSLDAQREACAAFIASQAGLGWKLVPGFYDDGGISGGTMERPALKRLLEDIRDRLIDVVVVYKIDRLTRSLMDFSKIVETFDAHGVSFVSVTQQFNTTTSMGRLTLNVLLSFAQFERDVTAERIRDKIAASRKKGIWMGGTIPLGYRAVDKKLVVDEAAAITVRSIFQRYLNLKSVLALADEFNRGQTVDEANPLRAPVSRGRLYHLLSNPVYIGQARHKDTCYEGAHEPIVDAELFASVQALLKEQGPKRRSRSNAPDLHLLTGLVFDETGDRLSPAYANNHGKRYRYYISNRLKVARRKDDTGWRIPADELEAIVDQQLIDLLNNKSQLAEWIEQCASKDKIASGLSEADRLPGCKAKRRSIIKGAVIRITLSPETIELAINPAALVRAILQSQGDGQSDAIGSKQAVIAAQIHNIIVVCQIQRRGNEARLIIGDQPKRERVPDPNLINLLARSHSMLSALTNGSARSISELSKATGIHRADLSKALPLAFLSPTIVDDILAGNQPVSLTARRLARLVDLPVDWNQQQSVLGF

SEQ ID NO: 707 - protein, 528 aa, synthetic construct
MSNYRSALYARVSTQNEEQDTSYHNQQKIKVEGYDIVKTYADRGSGTQVYNRENFKKLLYDCGIDLEKIRNTKTYNFIASDREPLYEAIVVSHTSRFLRNQVMMKTCINALRKKNVEIYFADLGKSSLDKDIDFVMNILFLLDEQESLNTSQKVRRGLERARREKQYIQVASIFGYNYIKEENRLIINEPEAEVVRKIYSMYLEGNGYRKIYDYLQEYYPQYPKKLSHIAYILRNEKYAGYNAYGKWSVNKIEGYKKRNKEYEIFKSDRIEPIVSYEDWCKVQEIISGKKLHTRGLKANTYPLSRKIVCDVCGSTYYRQLEVKGNYSRVYWICREKKQYGAKNCHSAPISEKKLIELIMSEDYGIKSFIRTIELQVNCVLNNMEEVDTSEIEEKLKQVKVKQERMFDSYIEGVTPKDIYNRKQLQLNSEENILNEQLSSLKDKNRAIEDIKNISETYKEKLDNYYKLMQEGKYDEVYNDINKIVIGVWLKQINDDGEVKVIPMLKELKFKGFESLDKLFEGSILIKNF

SEQ ID NO: 708 - protein, 508 aa, synthetic construct
MTSSTGLRVLGRLRLSKLTDESTSIVRQREMIQQWCELQGHTVVGWAEDTDVSGTVDPFDTAGLGDWLQERHPEFDAIAVWKLDRLSRSTINLNKLFAWCLEHGKTVVSVTESIDLGTPVGRLIANVIGFLAEGELEAITERIRSSRVKLREEARWGGGLPPYGYVPEPKPSGGKGLKVDESSRRVVRRIVDDVLAGKPVARIADELNAEGYLTPRQYYETGFATVKLPYGELPQDKYGHRKPGWHSTNLRRLLRSKALLGHVIHQGQTVRGDDGMPLKIAEEIIDSDEYELVQAHLDRVATSRRGLNRADFGPLYQIAVCFDCGELLQHNKTTAGGKTYRYYRCKNKNKAGHIDCGMLNAGEFEELVSEAFLHEVGDVEDVQRIWVRGDSRAEELNRAVTALDELSAAALRMTSATAKQRLQRQLDSLDALIAELEAAPTREGRWELRPTGITYRDAWGEGDGMTAARRDLVVRSGITVAAIVAAGTKSFRWEIRVPADVKERMRKR

SEQ ID NO: 709 - protein, 457 aa, synthetic construct
MKRVALYIRVSTEEQVLHGDSIRTQTEALEQYAKDNNFVIVDKYIDEGYSATNLKRPNLQRMIEDVKNNKIDLVMITKIDRLSRGVKNYYKIMEILEKHKCDWKTILENYDSSTAAGRLHINIMLSVAENEASQTSERIKFVFNNKIRRGEVISGSTPFGYKIVDKHLVIDEEKAEIVRECFTSYEKLTSMIKVLQHINNSFNANFSYNFIYKLLKNNIYTGTYIHNNLAVENFCDAIISSEQFNTVQKLLSKNTKVYNNKYLNSLGMQYIFSSMVICKCGRKMSGTYCLSSDKKIYKYYRCHVSQTTKKCNNTKRLSEKKLEDFLLKNVRRQLEEIAFGYESNNNKSKSKNNNNQLKNKIKKQINKLQDLYFDDLIDKEDYKLKYQKLNTQLIKLEKNNSEEKKSIINLKNIRSFLEINFEKIYSDLSDQEKRTLWTSIIDTIVIDENKNLTINFL

SEQ ID NO: 710 - protein, 477 aa, synthetic construct
MITTRKVAIYVRVSTTNQAEEGYSIQGQIDSLIKYCEAMGWIIYEEYTDAGFSGGKIDRPAMSKLITDAKHKRFDTILVYKLDRLSRSVRDTLYLVKDVFNQNNIHFVSLQENIDTSSAMGNLFLTLLSAIAEFEREQITERMTMGKIGRAKSGKTMAWTYTPFGYDYNKEKGELILDPAKAPIVKMIYTDYLKGMSIQKIVDKLNKMDYNGKDCTWFPHGVKHLLDNPVYYGMTRYNNKLFPGNHQPIITKELFDKTQRERQRRRLGIEENHYTIPFQAKYMLSKFLRCRQCGSRMGLELGRPRKKEGKRSKKYYCLNSRPKRTASCDTPLYDAETLEDYVLHEIAKIQKDPSIASRQKHIEDHELKYKRERIEANINKTVNQLSKLNNLYLNDLITLEDLKTQTNTLIAKKRLLENELDKTCDNDDELDRQETIADFLALPDVWTMDYEGQKYAVELLVQRVKVDRDNIDIHWTF

SEQ ID NO: 711 - protein, 547 aa, synthetic construct
MNTSRHQPGVNARPGRTGRSTVYPAYAQTGPESPTPGTKPIFLYLRLSKYHKDKADAIERQRIDLTRMLTAEGGWTIMGEYIDNDSASSAAIKTRKGWRQLNADIKAEKIGAVAFWKLDRTNRIASQCIEWIGDCQRAGVQLRSHQDSTDELNTATAGAKLVTGIKALLAEVETDSMSERQLASKRHLAEAGFHHGGMRPFGWMQGPRVTDAMGRTGIRLIPHPVEHQALKDAVDLVLAGKSLAQIGRYWKEQYGITTASGAYVYEATIYRSLVSPRMIGYRMRQVPEHQRGVKIDLLDYIARDASGEPVISQEPVCDRATWLRVRRLLEEAKTSKARKPWGSHEWLLTGLIYCQCGGRLYGHQKTRHRASGEKQVEYVYRCLTNRHRGAGNCPGSCTINANKAEAYVLGWFFSQITDEALAKARARRRAARSDAAVDDLLAQLDEATAEKNALLAKQGTSAYKGAMVTVLLGLIEDAQNRIDVLQRRVDAVELDHLVITDGPEVIRSWESKGIKEKRNFLRRMIQQIDALPGRGTIDQRIQITPVA

SEQ ID NO: 712 - protein, 483 aa, synthetic construct
MTTQSTVEIGAAYIRVSTNDQTELSPDAQLRVILESAKADGYVIPKEFVYIEKKGVSGRRADNRQEFQRMVATAKTQPCPFKRLYLWKFSRFARNQDESVFYKSVLRKKCGVEIKSVSEPIADGMFGRLIESIIEWFDEYYSFNLSGEVMRGMTEKALREGYQCSPSLGYAAVGEGKPFIIVEKEYVIVDFIHQSFHKGKDMTAIAREANDMGFRTKRGNRFDRRGIYRILVNEFYNGIVVWNGIKFQGAHETRPSITDIFESNQQRIKEEYRPKSRRETSSCQHWLSGILKCSVCGASLSYNRSNDQKKRPDFFQCWKYGKGVHRESCSVSVKKAEEAVLTSLRQVMADQSVQYEYIRKPDQKVISEESRLSEALEKVAMKERRVKDAYESGIDSLEEYKANKLRLQDERTHILDELEQLKETPDEPEGPDMQEILKRITTVYDLLMDPDIDNVTKGNAVRRIIKKIVFDRQMNEFHFYYYA

SEQ ID NO: 713 - protein, 423 aa, synthetic construct
MSLRIRLIVEMEQAFKESEWRSAKVKASYIRREKLAKEEGKAPRIRKPFWLNPDGTLNHLHQAVKDMFNWYLEGLGQQRIVVRLREKYTDTAIQKINPSTVMRWIQSEIVRGYWRGNRVYEPAVDDQLFFDVQAIHKSRLYKNVKPDRQWPLSGLMQCGVCGRGMSIQKSGKSNPVVRCSSKQRDHSCNRKTTFPYFIVHMYMMTHVLQHAIRLHSDKSSNKGLQIELGKVERKLATTRKKLNDEKEFYNKASNEGQNTTMILQLMNETYQKIEELEEQEKSLKASLKQSNRAVSAESRDLLFTPETFNLEMHKLGFKIVVGEEVLSTIGFDKPVSKMVYLGYCRKERAYKYADASSDFVKVWPSSLVTDELLNMQMLKNYINSSSGLKYIWDHIYDDDLEEKLKKRSNEKKEKEKKLKEKGE

SEQ ID NO: 714 - protein, 472 aa, synthetic construct
MKLALYARVSTEEQLNGYSIEIQVDKLTQYAKLNDYEYEIFTDEGYSAKDLNRPYIKILLDRLKNNEFDGIAIHKLDRLTRSVRDLQNIVDYMDQNNLKLISLNESFDNTTANGRLTLTMMGAVAQWERETIQERVCLGVKQAALSGKIVGTVPFGYNYDNKTGKVSVNEEEAEVVKIVFNMYAQGHGSNSISSYIFDNYPKEFMNFGNTQILRMIKRRSYLGESITRFKDGTKHVISNAYPQIIDQELFDKVQEVYKNKKEIATPRQKKNRRIFTGFLVCGLCGNAICGSASGSASKNTTLSYRCSHKYNRTKCRCSMFNEEELEKAFVEKMVSTLKAVKEGACDINVSFAKANNKEKLIKELSQIKNKRKKCYIAFENDLISLEEFKERSNEFKQKEEELENEINTLQDVAVPKIFNFECDNFPATWNNLERCDKIALLHDYVKKIEVSKLSYLTTGRRESLVIHDITFV

SEQ ID NO: 715 - protein, 510 aa, synthetic construct
MKIENYALYLRKSRADMEAEKLGEGETLARHKKILTELAARKGLHVGKIYHEIVSGETIAARPQIQQMIQDCYNGLYRGIIIVEVTRLSRGNQGDAQAILDCLRYGNNNNGILVVTPTKTYDIAHNQDDEEYMEFELFMSRREYKMIRKRMERGRIQAVVEGNYMGSYRPYGYDILKSKTGRTLVPNPEEAPVVQNIFTWAIEENLTPGKIAKRLSSYGVPTYSGDPEWSVSTVKTILTNPTYTGKVRWNDRMRIKTMVDGKLVSSRPRSHHGDQYMLYDGKHPALVDDATFLAASKRFHSDKTKSGLKLINPLAGILVCAKCGKAMCYQSYPARPETAARYTHKSSQICKVKSAVASDVMDAVAYSLEKYISDFEVKIDNLPEVSEDTILKQMDDLQKELIRQEKKLTRLFDAWEDGLIADNEFADRKAINNDRIASIKNQMDHLEESIPIKEDYEEKIMSFHDALSSLLDADLDADIKNAYLKGILDRIEFSRECNSEFILDVFLKED

SEQ ID NO: 716 - protein, 518 aa, synthetic construct
MKKCIAVYLRLSLEDVDKRTNQAKDESNSIAAQRQLIQRHIALNPYLSGLPQMEFCDDGFSGTNFQRPDFQRMIDLIRDGNIQIVIVKDLSRFGRDYLEVGDYLEHIFPFLGVRMISINDHYDSEQNLGNTAGMDVAFRNLIYDYYSKDLSKKVKTAMRVKQRDGGYVSCCLYGYRVLPQEKHKMVIDPETAPIVRRVFEEIIAGKSTSQVARELNAEGVPTPLEYKGVRRKNQSDKKPLWTHQRILEMLRNIKYTGCMVNHTRESRKIRDKAQYRVPEEEWIIHENAHEAIVSMEEFEAAKDALRKVRPYKKKTERDVYPFYCAHCGRKLQKTFGNDVHFYCATPYWNEEEHSCKEVRWDKTRIEEVVLEALKAQIAMMTVQSRGKSKAAQSKGTMLRQKLKILTGELKSGDSQKVQSYLDYREGRITREDFIALRAQREQRAGELQEEIARTEAEYQEYLDAEEQAKKERAIARKTGSLDEESLREIMYEAVERVNFVDGQNIEIVWKFDDLFRTA

SEQ ID NO: 717 - protein, 526 aa, synthetic construct
MPYCIYLRKSRADAEAELLGEGETLARHEKTLLALAKKLKLPITKIYKEILSGETIAGRPVMQQLLQDVEAGIWQGVLVMEVERLGRGNTLDQGIILNAFKYSSTKIITPMKSYDPNDEFDEEYFEFSQFMSRREYKTILRRMQRGREASVKEGKFAGSIAPFGYRRVKLPQEKGFTLEIEDAEAAAVRLAYELYAYGDPQPDGTFADIGRATIAKRLDQMGIRNRKGGTWATASVTRMLQNPVYIGKVHWNRRPEKKHTENGKIKKTRPLAENYLLVDGLHEPIISEELWNLAQAKMRQHYRPTGVNGVMQNPLAGLVHCSYCGNAMQRRPYLKTGQPASLICHTHFCPQISSPLYMVEGKILEALSLWMKQHEPTWEDESSINVFSTKIMALEHTIADMEQELQGLQFQFEKIFEFLETGIYTPEVFTARNKTLSEKMAEIRSAIEETQAELSNLKAARKNQVSMIPKIKNILDTYETLTPAEKNKLLKEVLDHVEYHKKIKGKKNVSADNFEIILFPKISPEN

SEQ ID NO: 718 - protein, 516 aa, synthetic construct
MNNIACYIRVSTDKIDQQKSLEKQRILLQEQYKDCNISMYSDTGTGTSFKRKGFKQLLFDCGLNEKILKDGRLTFEVDAIREPLFNEIVVINTSRFARNIAIIDILRILWDYKKVNVKFLDVQKNSNNPSDMILLQMFFAMAENEISEISKRTKRGNKTTIIQNKIRNNSIFGWDFDRETNSLIANEEEKKVVEFIFETALTNGLKNTAKLVNEKGYRTKKGNLWTDSTIKTLITNPKYKGYNVRNKFESINLFTESRSKYVKKENWVVMKNDRIEPLVSEELWDKVQQALNKRCIAGNKGQNARIYDTRGKIKCKCGANYVRCVTTKVANEPKDKHYLICGHKKKYGKNYCRAENITVGILDSFIEEQRKSYYKNIQLQTRVKIMQLEKEIDNISKDEVFSIKEKEQELDVLREKLDKLLDTFLSSSETMQKLVEKKIGELEYHIKRLELEIYNIKSIYADKEKHLRQLNNKIIKLKQELINSTDKELTRKEWLDKVDKIVIESKISFNVVYNLD

SEQ ID NO: 719 - protein, 475 aa, synthetic construct
MELAAIYERISDDREGRELGVERQNKDCLGLTRRDGLTVFGIYRDNDISASTNSRKPRPEYNRLIADAKAGKFSVIVAYTSGRLTRRPREHEDLIDLATGYGIRYRYVRSPSFDLNTAQGREIARTMAARDAGEAEEIAERVAAEVLDRAERGEYHGGPRGYGLAPNGRDLIDHEAAEIRAWYGHVLAGGSLSGLEAALNRRGVLSTTGKAWRAPVIRKILLNPRNAGMRILHDVEYAAPNKAIVSRATWLAAKQLLENPARRIHQSGPARRHVGTGLFICERCDPVTVNVNYDRNGKLLYRCLSCHRTWRADPIHRWIDATVEAMLDREDARQRLLPEPAEGVDLQDLWAEAAAIQNNLGELAAEFALARGAVKAALKTGLDRGQERLDEIQAEITAAGRVDATAALLVARNPVAAYRAITDVSLRQAVLRSMIVVRLGEPIRGRATWDATKFMGASQWAHDDRTWAEIWAGDS

SEQ ID NO: 720 - protein, 534 aa, synthetic construct
MQPAGTAYTAAEIKSLRLKGAMYIRMSTEMQVESPENQERAIRTYAAEYGIEIIKTYADLGVSGINTEKREQFQALIDDVEQGRNGYNIVLYLDESRWGRFVDSREAEYHRMRLERRNVVCQSCEKPVTLTSNLADRIMTLLRDESASDYCRQLSQKVWAGQCNLVSKGFRQGGVAGFGLRRMLLDEAGRPKQELAMGQRKSLLTERVILMPGPEEECRTVLWIYDQFIAGSSETYIATQLNEQGVKTHFGRPWSRGTVCEVLTNEKYVGNNLFNRTSGKMKSRAKPNPENEWVRKNHAFEPVVDLERFYTVQGIYRERNKKATDEELLQGLRDLYASQGRLSALIIDEADFLPPSSLISNRFGGLLRVYQMIGYTPKRDYQYVAINQRLRALHAEIVADVVRDIENLCGRRIPMDPESCLLELNHNLFISVVISRCFTTPSGIRRWKIRFDSGLRPDITVAVRMDVRNEAIQDYYILPALEFSADQLRLSEENTGFLDGFRTDRLDYLLKLSINISLDKAVHHGAWGHSAYFH

SEQ ID NO: 721 - protein, 489 aa, synthetic construct
MSTAVLRVLGAVRLSKLTDESTSPVRQRERIEWWAQGHQPATVVSISEDLDTSGAVDPFKRASLGKWLTDTPPEPWDVLVAWKLDRISRSSMDTETLLRWCLDRGKRIVCVDDGIDTDTQMGQVWVKLASIFAEVERNAIKERTTQARKKLRSESRWGGETVHYGLKPEQIPTGGYRLVHDDEAVAVIRRIVADVMRGDSVQSIADRLTAEGVPSSRDRQRQLQGREMTGAAWSTTTLHRLLESKTLLGYTVHQGDADPEVMKSEPILTASEFRSLQAVLEQRKRPKTTNRTSNASPLLGVAFCLDCGVTLHQKSQLAKGKRYRYYYCPSKPQHGNKIPGEWLEQVLEEAFLHELGDAEVHEPVLVPASDHTDELESARMQLETVASAMRKATSQTVLEVLAEQVAELDARIAELETLPVQPARTEHIPTGRTYAEDWKKSDTDARRRLLLDSGIRYEVLVEGRTRTQGGAFKSNLLVPEDIRDRMVKS

SEQ ID NO: 722 - protein, 552 aa, synthetic construct
MKAILLVRVSTKVQDFDEQEKEIYRMAVKDGYKPEDIISICEKESGIKLPEEERAGLNRMKELIESDNTINCVYCWEVSRIARKKKINFSVLDYLVERKVQLIVKNPSIRLLKDDGTVDEAADMVFTLFSQMAESEMRTKLARWKRTKDANRKQSIYTGGWLLYGYKVDNGRIVEDEKEASVVRKIFNMYLTGNYSYNSLAKELTEQGIIRKGSRTYACKFVSLTLRNIAYAGEPSSSSGLNKLKTEGNVYPPIVTIEMINKCKEIAKGNILLPKKKYDNYYFGKGLLRCPYCGSIMVAKKNNNTYHCQNCDKGIWVQINIVDSILWRVASGLYLSKLITGNTKDRIAYQKKLKEYDNKIATSEKNLKDIENRITKVEDSAYLDGTMSIDRAKGIIKQLGGKLADERKMLSQYYMEREQIQGLLIKVDEPKELDVSNITDDKLRFEIIHETIEYAFIDRINTIKCNISIYIPYNNEPLRFELHTKANKVFSLIDGYSKGEEIKCYERRFITPRNVEKSSEYNKKYCREHKAENARRQREYRARKKALKERGL

SEQ ID NO: 723 - protein, 609 aa, synthetic construct
MKKIAYSYLRFSTPRQAKGDSYRRQMEAARKYAEEKDLSLQEDAFNDFGISAFKGRNVQNGALGDFLTLVQDGQIPKGAYLLVENHDRLSRTEPEEALHQLQSLVRAGIVVVTLHDGEMYKRGEMDVMRLMKSIIYMERAHNESMIKSQRGKSIWEKRRQDSLQTGKVCRASRLPSWLKWEGEQVVIDEDKAEAVRLMFKWCAGGAGYQTIARRLNDTRVPTFRTGVEWRAAVIAAILKNRAAIGEFQYHQKNSEDKRIPIGEPINNYYPSIVSVSSFQAVQSTIRKRDNHSGQFSKGRAHNLFTSLIKCGNCGSPMTVATKGRKTHGSPASTHFVCTRASSGGGECLNLQWDSSVIERHFKQAFPLFMDHYTRGDTDLDLTRKVNEHVSELQRDIELKQEALEYIVSAIEQGQGVQVFVSRAAALEAEIIGIREQIEDVRTQALPKTEDRAVRLERVIKLEKVLSTLDMGDVRTIAAKRLDFNAELRNIFSSIHLFWCYSHAQGVMVFVDHYGQEVLELQFQEGLEHGVALTLVEKVHDELELGCTVSDEPELLFEFEPRHKELKTYVERSQQARGAAKRRLKEKTERAEELTRLGLLEGVIAGYMNE

SEQ ID NO: 724 - protein, 496 aa, synthetic construct
MFSNTDMKDLIRPTIEQPRRTAAIYVRISKDRVGAGLGVERQENDCRKLAEREGYEVVTVFSDNDISAYSGKKRPGYQALLAAMKSGAIQAVFAWHTDRVHRRPTELEPYIEASDQFNIPTFTVQAGPLRLDSPSGRMGARIHGAVASYEVEIGIERQKAAKLQAAENGEWSGGQRPFGWLAGAMQVDEREAAVVREIIDRFIAGTSWRTIALDLNARGIRTQHDKGWNALKVRNIAIRPRNVGLRDHNGTAQYEAKWEALVDQDTWQRLQTAIVMSRNHHTQRGPFRKHLLKGFAYCGRCGNQMNSFSKQQRDGSYKATYRCRAMDDEKGHIGCGAVSRLGAPVEDLVKDAVFFRLESDNLGRLVSASSTETPKLRQLLADRHAQEVRLSEIVSLYGSGDLTFEEYKAAKSSAASRLDELSRRINAATASSAYANIPIGSSLSDAWDGADLLWRRELLDLIVDRVWIDPVPRGESLTRYKSWTFNPVHVRIDWKV

SEQ ID NO: 725 - protein, 575 aa, synthetic construct
MKPSAYSYIRFSSPEQAKGDSLRRQSAGASKWADKNGYQIVEVLEDRGISAFRGKNTTKGRLGEFLALVKAKKIYPGSALVIESLDRFSRQQVSEVLPDFLNIINAGIRIVTLMDGREYTKDSLDKDTYDLFGSLSIMARAHEESQRKGERVAEAWEEKRRKARDKNSEKLTDRVPAWLDAKRDDAGRRWFEPNGHIGIVKRIFEETANGYGRRMIAKRLNAEERWSFKSKKPWQPSSIAKILTGRAVLGEYQPHKRNRKGKRLPDGPVIQGYYPCVIDEDLWQRANAAMRRRRTDAAGRPHAEAANLIRSIARCTCGARMMFVNKGKPPRGGRYFLCSNAARSGGCTLTRLWKNELVERSLFRRLDKAVLEQTVVGGAEPTRQSSRDYDLLIQDLVRKQKRVVDFLADSKDHEDDPVFDSKIKTLRAEIAAAERDRDLAAKAELSRANLPETRSSWAEARAFARRLDSASDEERVNLRRLIIQRIRTVFVEVRFSSHSIAVVVELPGKPTEMPVGPMTWIRTIESKIDEKTQRYFICDKIYTDDPEHAVRMGREPYTPGAGSFLYPMDRLPEAG

SEQ ID NO: 726 - protein, 637 aa, synthetic construct
MNDVQVIKANRNENRIRGRKVEILRVAAYCRVSTDSEDQLNSYKSQVMYYTDLIKKKPEWSLADIYADEAITGTQVTKREDFQRMINDCMNGDIDMVITKSISRFARNTLDTLKYVRMLKEKGIAVFFEDENINTLTMDGELLLVVLSSVAQQEVENISSNVKKGLKMKMQRGELVGFQGCLGYDYHKDTKSISVNEKEAEIVRYIFNRYIEGAGCTVIANELENLGYKTKYGSSRWVQSTVIGIIKNEKYKGDLLLGKTFTVDPISKRRLENFGEEDKFYIRDHHEAIISEEIFEEAQKILAKRNVNRGVHQEGQKRNKFSRKYAFSCMIKCGFCGGTLSRRNWHSSSAYTKTIWHCVTATKHGKKNCPHCKGIPEEVIENAFVKSYQLLCSDQHEVVSEFLQKVEDILKDDASLKRLPKIEKEMTDLQRRKEKLLDLRLDNNIDRDIYDKKNQELSEQLKKLQAEQLQLVELSKNQESTKTRIREFRKNLNSGELLENFDRVVFESVVERIIIGGYNDEGVEDPLKITFVYKTGIHSNLNAKDFKPKRKNAAAVHTDAELCSYASVEDNKLCLHSSSDTCRVRGCTTSGRYVRILDFRHFERHMMFSQSDRKTYKKAISDGVNVSVVLDVGCGNT

SEQ ID NO: 727 - protein, 472 aa, synthetic construct
MTKIALYIRVSTEEQAMQGFSIDHQRDRLIAYCASQGWEDYRFYIDDGYTGTKLDRPAMTRLIKHTLEGKIDLVVVYKLDRLSRRQKDVLHLLEDVFEKNNVAFKSSTEPFDTATPLGKATIGILAVFAQLERDMIIERTTSGRRMRIRQGRWSGGRVAFGYRWDKQNQTLVIVPEKAELIRKINQMYLQGKSRLELADWLNARSTDIKVDHNGIKSILDRVIYTGRLPNGPSEPVEGQHEAIIPLDLYTMVQNETARRRNGLTSTGAYLLSGLCRCGLCGSSVIRVRTKRQTHTYEYYACKNQHVRKRDRKGQEHCQLGYFPQEKLEAWIIAKVRSTAIDMEDLRTEIELSTEEQRQSCVVLSAIEEKLTQIDHRLNRWYDAFEEGFIQPSHLKERIDALEAEKRALWLQRDTLEEAAPEPARKEDLFNLMRLIDQSWDDLDFDARQAVLRAAIKTILLRPNQDLEINWNV

SEQ ID NO: 728 - protein, 470 aa, synthetic construct
MLRPICYERVSSIQQIEGGGGLDDQRSALEGYLDRNSDKFNNERVFIQDRGVSAFKNSNISSESQLGIFLQDVQNRKYGEGDALIVMSLDRISRRSSWAEDTIRFIVNSGIEVHDISASTVLRKDDPHSKLIMELIQMRSHNESLMKSVRAKAAWDRKIIEAVQNGTVISNKMPMWLKNVDNRYQVIQEKADLIIRCFEWYRDGFSTGEIVKRIADPKWQMVTVSRLVRDRRLLGEHKRYNDEVIHNVYPKVIDDDLFLTANRMMDRVMLEKNKPAEDLLLESEVVQEIFQLYESGLGSGAIVKRLPKGWSTVNVLRVLRDKKVVTQKIIDNLTFERVNQKLSMNGVANRIRKDITIAQDDYITNLFPKILKCGYCGGNIAIHYNHVRTKYVICRNREERKICDAKSIQYIRIEKNILKCVKNVDFQKLMIESTGSETSVLDGLREELSSLRREESSYNDKINERKLAGK

SEQ ID NO: 729 - protein, 467 aa, synthetic construct
MSPAALYLRQSKDRARDEAAVERQEAACRALAEAKGITELRLYVDNDRSATAGERPEFERLLEDVRAGHVSVVIVFHLDRLTRSIRDLTRVIEAGQPRRLNIASVHGVGIDLGDPTGVAVATILTAVAAMEVQHKGTRQRAANRQRAERGAAFWTRRPFGYDREGGRVYVVEREAEAIREGARMILEDGATLSAVMRAWDAAGLRTTGKNRAGEPGRWSVTKVRSVLLNPRYAGRRMYNGEDVGPGDWPAILDRDTFDDLTVKLTDPRRRTAPDDLNAKHLLSGILTCGKCGARMFAAPSKYRGNVRMTYRCHGGYCMGRGMEDVDRVVTAVLLARLAQPDALAAMSPTEDVQALHARAADLRDRRDALAELLADGLMSPTAVREQAGRLNRDLTDLEGRLAAATGSDPVVNLIQSEDVAASWEAAPVAERRRIVRTLMEVTLLPVGKGTRFAPEHVRIAWKGGNDD

SEQ ID NO: 730 - protein, 509 aa, synthetic construct; identical to SEQ ID NO: 64

SEQ ID NO: 731 - protein, 489 aa, synthetic construct
MAKAYSYIRFSSAKQAQGSSLERQQENLSRFLAENPQYELAETRFEDLGISGWSGEHLGHGLGKLQAAVNAGIIEAGDIIVIEAIDRISRLPLEDAVSLTSGILNKGVAIHTVEDRTTYDKTTYRQGHTALALILKTFASWEYSERLSERVKASYSKRAEAVRKGETIRRKNACWHTSDGKVVEEVAVHIRWMFEEYIAGAGVRKLAGEMMGRHPAFARVNPSHIRRWLRDKSLIGTWAKRDGEEVPGAFEPVLTPDVFYQAQALMNPQKDYTHPAKNFLTGLVKCQECGGNFAVKSQGTGNPFMGCYARTYHRCTNGTSIPLLVLHRVVMEEALDYIEDGIRASRLGEHDKHRLVVQGKLEEVQRGINGLSEAIAAHGFMPELNAKLAELKVTRTSLEAELARIPQKGDKEPVTNRELMAVWNGDKLKLNAMLQRAGFAVWCTGRKMKIGADGPEYEYLRYARRAKDFIVKTPVGEWELDGSQGNYHD

SEQ ID NO: 732 - protein, 472 aa, synthetic construct
MTVLSHNIHQRSQLNAKIQGYHQDRLAIVYIRQSTLQQVERHGESTKLQYGLVEKAHALGWSRDQIIVIDDDLGRSGSNAEGRPGFQRLVAEVGLDRVGLVLGIEMSRLARSCRDWYQLLEVCALFRTLIGDSDGVYDPTSYNDRLLLGLKGTMSEAELHVLKQRMVEGKKAKARRGELGMQLPRGYIKRPSGEIIKDPDEQVQSTISLVFELFDKFSTINAVLAYFVKNKLLMPDRVRIGLEKGELVWRRPNRPTLGNLLHNPIYAGAYVYGRRPTDPRKKKPGRPATGRTVAKPSEWEVLIKDKLPAYITWEQYERNERQLEANSMQGIGVPRQGPSLLSGLLICGRCGLRMSTYYTNNSNKLRYSCTRMSVDYHDPVCQSLVGNPLDQLIEEQILDALKPSALEISLQVAEDIERERKNLLGHWDKQLERARYEVERSYRQYNATEPENRLVVRTLEKNGKKLYLLKKN

SEQ ID NO: 733 - protein, 515 aa, synthetic construct
MKKQAISYIRFSSGKQAKGSSEWRQDAKVAHWLTQHPDYEPSDLSFEDLGKSGWKGAHIEGGMGELLAAVEAGFIRPGAVVLVEALDRAGRLDVADMLATVITPILRAGVSLYTLDDDVEYTKDSLNGGHIYLLVAKIQAANQFSERLSERVNKSYVRRREEAAQGKIPKRRTPLWLDGDGQLIEHLAPHIKQAFELYADGFGERRILRRLQETGIPEFQGLYGSTLKRWLQNKIAIGNWGDIVNVYPAVVDPELFYRVQERIAGNKTTRPASPSKHALTGIVKCGHCGRNYNYHVFKEQPTVLQCSNRFMTTAEKCENSKSVPLAVVEFVLLKTSQQARVEAIRKKKLTVNQKRVIVIEGEIASITQRLQGLARVIGRIGDEPELVQQFDELSAQRETLQKELESISASGSDVSILDQVQDIQITDADPMQLGADLQTVGYTITCTMDGKLVTTHGEIREWEYVGYQRASDSYVVKEGGQSSAGQFTAIPVAPFRNGSENIMEALGLKLNLIKE

SEQ ID NO: 734 - protein, 482 aa, synthetic construct
MRAAIYVRQSLSHKEGIDRQLSRCTAIAEGREYQIFDLYKDNEVSASKSRATSEWSRLLKDARRGKFDVVISVDLDRLVRSQADLLDLIETKVALLTVDGELDLTSAEGEFRASILASLARFEVKRKSERQKRANAYRVEQGLPSAGKRRYGYYPGNLKVREDEAAILRGIYSGLLDGKSLRSMAADLTRRGVPFRDKVVQWYPVRLRDMMNNPAYYGCIIVKGKAVPSEHVEPLIGKDVWENAQAILNDPSRKTNPGAPRKHLLSGIMVCGICGSKMRFTNGSYYCKTPIAGHPVIKGSAAEALVIDEVALAYLMGPAEPLRVQEGDDPRPLQEALAEVEAEGGRIMDDRREGRASPDNARRSLLMLKERRESIESELSRIRASSGAMHALGELAGHLSPKTRIVSLSGGGDPRKARDIFREEWERLTYDQKRDVIGYLLQITLYPGRKNRERMRIHHKIAVGLNEDEELSEVDVRVSGVS

SEQ ID NO: 735 - protein, 494 aa, synthetic construct
MKAFPILRVSTTAQVKEDGGLDSQLLYLQHWLEQHPDYTIESTLELDGYSAYTSKHRPLIERFVVSLPRNSTIVFSEVSRLARMGQKESLEFLFWIMNQGVSIAFAQTNTILKAQDEIDVMTMQQLSMLFEMSRSESAIKALRINNAFKLRLDRIREGSHFKTNNLSAWLKPNKQTKTYHVSDYDIETIQTAFNKRLQGSSVGDLHKWLVADRKPFGKMKGWTVNYVGKLLRMRQVLGEYQPVSIYQENGTTKRKPNGDPVLDYFPRIITNELFSQVQVTFRNEARGRTSASVINPYRGILKCKGCGGAMALNNSKSQGARLRCEAQRNKSRICTNKSMLFSLADERIQSFLRSFDATAFNSSKRSPDTLQLEIEALNQSIKQTSQALATVGVDVPELVTQIQGLTEKRNQLQHELMLPRDVPISPVDVNRDTNPERYNQSIRDLFKGIYLSPTHTKFVFNDILSQGIPTVTVDHEEHTGEIDSMKLIKDAYEL

SEQ ID NO: 736 - protein, 397 aa, synthetic construct
MTRSRQGKFCGGQPPLGLMRDPEDKGHLIRDPETAPVIRKIYDMALDGWGCMRIAKQLMDDKVPITRVKSNTECDVNYYSWGSARISHILRNPFYKGAHLVCRTHQKGIRSNTYDIIPREDWEIIEDCHEAIISPEEWEQVQEIIDRRPTIMKGNSCPFYNLFHGIIYCATCGKSMQVRYEKVGRTGKNRFTGEQREPIDKAYYICQTYNRLGKNACTSHKIEARDLYNLVLKDIQELAKTALKDADAFYQRLSSRMERRYLLDASQTQKECQRLESRNCEIDEMFLSLYTDKAKGILTEQRFMKLTATLEQEQEANQKRLRDLLLMMRHSDEQENEVRTFIKEIRRYAAIEELDEAVLNRLISKILVGEVKKIDGQKVQEVRIVYNFVGEIPEITA

SEQ ID NO: 737 - protein, 539 aa, synthetic construct
MKIQQRTRTAIYRRLSRDDEQSGESMSIENQRILLERYAKENGFEVVDIYTDDGWSGTNFDRPDFQRMKRDIENGKIDIVLVKDLSRLGRNQIETSLCIQVFFPEHQVRFIAVSENIDTAKGEDDFMELRNLFNEWFVRDTSRKVRSGYRQRALNGDYTGAYAPYGYRKDEHDKHKLVPDENTAAIVQRIFQLAVEGYSPYKIGRLLREDRILTPRAYLAEQYQRYLKVVNTKHPYDWGATTVKIILQNRVYFGHMVSHKSTKRSFKRKGLVAVPPEEWIEVPNTHEPLVDEQTFALAQKVIRVKKRPTKEGEHQIFAGLLKCSTCGHGLSFARGGNSKTSGGKGGRGSFACNQSRTRGKAYCSFHYISYVDVYEIILKDIQRHAQTAKDQESAFVEMLAEMSQSQQKKQWGAAIKERDKLKKREIELQTVQRKLYEDNALGRISDEQYVALSRDFTAEQAQMKERLKLLEEQLGQAESKRESTTRFLELVRKYTDMKELSKPILNELIDKVVVFDAEKVNGKRVQRIDIYYRFVGLLS

SEQ ID NO: 738 - protein, 444 aa, synthetic construct
MRMACYIRVSTDRQADDGCSLEMQRATLEKYLSIMNLVSDRDQVSWYCDDGYSAKSIAGRPSFLRLLKDIREGTIDALAIWDLSRLTRSIWDLRDILNLLAENEVELYCMNDDVHTETASERFSMNVRMLSYQFEREKVSERTNAVLIDLVKNKKRYVAGGKIAYGFRRTREKELVIDEERARYVREMFRLARHGMSLEQITLALNTLQSERYFQVENVRCMLKNRKYSGHYLFKGVEYDDIIPPIVTDEEQQEALDNLNHHSQKSDNYIFAGLVKCQCGTPMTNGLAWGSHYPRRYYYYHCRECNKYFSQIKLDKYFRSYRFPEGGDAFFDRIQTMLTGRQKAIRDRLRRLDEKYASGYVQEKEYLMLREVLESRSREAAEDQESLGCLNKKYADMDILEKKRYVHEKIKMITVDPIGKKVLSVEEREPLDPAESPVGKIGKG

SEQ ID NO: 739 - protein, 570 aa, synthetic construct
MREAALLLRCSTNLQDYNRQKNDLLALADKLGFNVREEYIFGEYVTGKDDIRKGNRQSIQSLIDVCLESMVDAVLIWEVSRLSRNFIYGVTTIDKFNRDYKIPIYFRDKRKWTIDIETGKIDIDFEKDLRKYFEQAEAELITLRSRLASGKRDAAGLNQVIGSVAPFGYDRVNKRNVINPVTSLVVKEMYEKYLEEGATLLSVSSYLSAKYPQYIVKLRSAGSIRNILVNKANTGILVYTIYDEIDDIGYRYEVMQPSIISVEVYNAVLAKLKKNRTITAYPHSKKHLLQKMLFCYECGTCYTPSESLKRGTCYYRCGQKTAHIKPCNNSMSLNESIIDSVIWKFLKEQLFSESELNKEQREIAIEKEEENRKNIVTDIEIVEGAIANTYKDLDSLEDMLITRRITSERFDKKKAKIDTKLGELKHQKDKLRERINAIDFNIKRLNNLDYTQSFFNEVENDLEKKIALLKEYVQFIYPYMIGKNIVLLKTHTVDGIYYIFYRIYKGNFSKDKIQRTAYYIHEALAEFKPNGNNNFYVPNPSILGIDNEYLYYFVDEMKEVCENNGFEFEY

SEQ ID NO: 740 - protein, 518 aa, synthetic construct
MTIRHVAIYLRISRDKKEGIDTLSNHRDILIDFCRSSHWTYERYEEIVSGGGSELENRPELYRLLNDIDLFDGILVFELSRLSRNGLVSQQIKQVCIDYDKKIITPYQIYDLANNHNDRLLYDFGSVIASQEHALIGKRSKTNKKIMAKSGLHVSGSVPFGYVRNPHTKKLEIHQEQAEIVKLIFQLHAKGYGSFSIRNILNERGYRTAKGGYFELPTIKRIIRNPAYKGTNVFNDRKKVKEKDRFIYKIVETIQVPNAWDPIIPPEEWEKANADRKKRADHAETTREKAANKTGVTLLKDLLYCGVCGKKMTIRKDKGSKYMLKRCEYLLPSGEKCPNRGVMLKYVEEDVVEHIKQYKDEIISILYSLKLEEWSGTEKDYNNHLEQIEKEIRRIRTEEENLLNLAIKGLFSEEQILTKRQELLNTLHTFTAQKEAIIDELTNLKKLDTKERLQTAVEGIHGLEIVLENDMSEEANRSMKRIIHKIYYKRVLPEDLLKKSTRNKERKLYPFTLNIHYK

SEQ ID NO: 741 - protein, 567 aa, synthetic construct
MAIKKIKSYLYTRISSLQQQAGYGIERQINTVMDFLSEASLPAGLGYELDPNDYELLESDLGKSAYKGHNFTKGELGRFKEKVVKGEITEGILLIENVDRFSRLPDYEAIEHFNALIKRGIDVLEVESGQVFSTKLDGTLSKLAVSIERSHQESKRKARLTTRNWEKMKRNALETGKALKNNCPNWLSIRDEQYEIDEPMVAIMKVAFERFAEGYSAASVVRFMNDSNQLINNRKWSTMNIYHMFRNRRLIGYIDKVKYYPAVIELELFNRVQSMIGSSNKSQKTTQHQRSIFNGITKCALCGSGMIVHSTGKGILYLRCIGERSQNGCKNGLIRYPVVERILLNHINKLDLSRIYNSGNDVSVIGELHNKLASLNHSIQEYQSELEGADDIVVLQLARVLKKLNTERDELASKIAGHNLTSYEKVDYDIESIVNQENWELRQKANIELKKIIKQIQVQRRGDEKVLYLINIQYYTDILKHVLIMNNSGSLISEITITEKENERIYQVREDGETVFKVESDGDAWVLNASRTKKIDDLLTYISVMMVGREPEGFVYQLNEDQIEWID

SEQ ID NO: 742 - protein, 530 aa, synthetic construct
MGRFADRVRGGGMGADTVLVVEKLDRLSRQETRTTLRWMEDLCAVGLTIATVDGGKIYDDASLRADLMTVFEILMRAKLAHDESQQKSERVTDRYGRNIERARTTGQIITAKAPGWLKAKADRSGFEVVEDRAKMVRDVYEMAAQGKGPRWIAKELNERGIPAWGRWRKTGSTPTWEIGSVKMILGQPSVEGDYMPGFSNTSANRTKFDQRVVGYYPRIVDAELVARARAQMESRKTGPRKGGRHTRGVANLFAGVVVCESCGNRMHLRSSGGFPQRRYWQCNFAARLRGCTQKEMFRYEPFERAALDEILHLALDDRYFAQPDQTAYLAAALASLEKAITDKKEQVDRWVAALGRIGSSEALETQLVEAERSLRDLATQRDEAVHALELAKGAVSPAEHLERVRDVREALDDPDPTIRLAARLKVHNAIVALDCKVVCGVDPEDGRQIALLLPGNVLACLFDDDGQVVMRFDGLEFAQAVFPDLAPEALIQRVEATLTNYPVEHQAWRGPGAMRRGWLSTYIDRHRKGR

SEQ ID NO: 743 - protein, 553 aa, synthetic construct
MTKAYSYKRISSLKQAEGQGLDRQEDSVNKWLAAHPDVVLDTRFSFSDIGKSAFKGRHLAADAGLGMFLDAIEKGHIEKGSYLLIEAFDRFGRDDVDDARNRMVTIIKAGVSIVTLMDGREHNESNRGDIAYMITSLLQMHAAHDYSLKLAERVGKAKRAKRIAAKESLTVMSKQCPSWLDIVKDKCGKETFIHNAGAKTVQLIYAMREKNSGLPAITAYLNEHIEQYPPLTRQKKTRVWSQTTVRDILRAVSVLGTLPESRLKDSNGQPKYPAVAGYYGLPVISLDQWNKVQSLNVNGGGYKERSFPHGINLFRGLIRCSKCDGLMTIEGCRAGYHGSITCRKLSGKGCDAPRLPMRLFEAAIVNRLLINMTTEEYDKTLQKSLNTLVTEISVLGDEMKALHTAMRYARSEVVIEDIVSSIESITSLITEKQKQLDLLRQQSTSTKKHLFRDCNLKTNEGRIEARGLVFSYVKNITLNTTMKSCDVIFHNGKRVNNFSLVEVITGSEQALPILEGGYLDGWSNLMEDTGTLDFKDLNDFKSESEAVKIILGK

SEQ ID NO: 744 - protein, 526 aa, synthetic construct
MAEKRKLAFYIRLSDADEEVKEGTKDESNSITGQRKLLYAYIKKTEEFAGFEVLEYFDDGYSGTMFNNRAEFQRLIQDAELGRFECIIVKDFSRFGRDYLEVGNYLEFVFPAMGMRFISVNDNYDSDRNFGVTGGMDVAYKNLIYQLYSMDLSRKVKSARRTRNLSGEYTASFVCYGYKKDPDDKHKLIIDEEAAKVVVEIFSLIIAGYNASEVARILNERKIPTRVQNQWKNGINYVPVHNKGDYMWDNSEVIAIVQNEQYKGIMIQNKCETVGFGDNKKVRKRNKEDWSVVEGAIPRIVSDEMFDEVNKMLRVEARGIEKSTKKRKKNLFICPYCGRKLMNSSAVCTPKLLCPKRRMVRTGECQQIFMLKSEAQDKVLEITKEICRTLIQEEELKKASKDKRKVTSDEYLISELKAEYDRISNSTVSCYQSYREGKYTKEEYVQLRKTNQELLADLENQISDLQEKVANQEPDAEEKIEQLTQYSMLEQYDGDVLSNIIDKVLIYNDKDIEVVFKGENFIRNAV

SEQ ID NO: 745 - protein, 514 aa, synthetic construct
MENWGYARVSGEEQQTDKGALRKQIERLRNAGCSKVYWDIQSRTTEVREGLQQLINDLKTSSTGKVKSLQFTRIDRIGSSSRLFYSLLEVLRSKGIKLIALDQGVDPDSLGGELTIDMLLAAAKFEVRMVTERLKSERRHRVNQGKSHRVAPLGYRIDKDKYIRDRSPCVCLLEGRRELTVSDLAQYIFHTFFECGSVAATVRKLHSDFGIETKVLNWNKLEKSSRIVGDDDLDKIAFTPNKTNHPLRYPWSGLRWSIPGLKALLVNPVYAGGLPFDTYVKSKGKRKHFDEWKVKWGTHDDEAIITCEEHERIKQMIRDNRNNRWAAREENEVNPFSNLLKCTHCGGSMTRHAKRVDKSGQAIYYYQCRLYKAGNCSNKNMISSKILDIQVMDLLAQEAERLANLVETDEPLIVEEPPEVKTLRASLNSLETLPASSAIEQIKNDLKEQIAIALGATNNASKQSLIAKERIIQAFAHKSYWQGLNAQDKRAILNGCVKKISVDGNFVTAIEYRY

SEQ ID NO: 746 - protein, 466 aa, synthetic construct
MKTLIYARVSIDREGRSLDEQIAECCQWADREGWEVVDVIRETGSASRYARSTGARRGWDDLTAAVSSGNIDALLTWEASRATRQLTEYAVLADLCAEHSVRWGYSGTLYDLTTRDARFRTGLDALLAQDESARTSERIQRSTRARAVTGRPHGKLPYGYRREYDPQTGALLRQVPDEEQAPIVQEIARRVIAGHSLRTIAADLTERGIAIPRPARNRTRPDAWLPVTVRRIALSPTNAGLRVHRGEVVGDAAWPALISREDHDRISELLNAPGRNRRLTADSTAVHLLSGIAVCGLCGGPMRRLNPKRARPNYTCRDCMKIARAQAPLDQHVTDVTLALLEGIDASTIDAPSPEAEAARAEADALERRLEGFTIAGAEGEVSPAALAKIEARLLPQIRAARAKAKALSTPAGIDPSAVRDPRAWWGAASLEQKRTLLRAAVRVVVHPSPATKSFRPEFVPVTPTW

SEQ ID NO: 747 - protein, 506 aa, synthetic construct
MKPTQTADARTRAVIYCRISQDRTGAGLGVDRQRQDCEALAERNGWDVVEVYVDNDVSAYSGKLRKDYRRMLTDLDQGAATVVIVWHTDRLTRSIVELEEYIELSDRRGIATHTVQAGTIDLATPSGRMTARILGAVARQESEHKGHRVARARQQRALAGEWSGGIRPFGWGVPTGEMRTKVDRKTGEEVEAPVLDTNRIVPEEAEALRHWTDTILSGGSVRSLVRWCADKGITTTRGNPVTHVEVRDMLMRPRNAGIAVYKGEEVGRGLWEPIVEETKFRAVVAILTDPARRTTTGAQPKWVGSMLYRCGRGECGQGMTVTQSGGRAYPSYRCPTGHGGGRRAEVVDKYVEDTIVERLERDDAHELLLPGPADIDTAGLQAEAERIRQRMRDLGGLFGAGQLELVPFTEGMETARSQLEGVTRQLARAAAVDPLVGLVGAPDVRKAWRARELEQQRTVLRALVEVTLKTPRQGRMPDGGYFDYSAVVFKWKRGATASSRHALDER

SEQ ID NO: 748 - protein, 492 aa, synthetic construct
MSTKRFRAAVYVRQSRRAPEGIERGLERTHSLIADRGWTLVGDYADDATSASSARGAGTRWNALLSDIKAGKVEVVVGVDVDRLVRSIQDLAELIELGVRVVTVDGEIDLTTADGEFRATMLAAIARFEVRRKTERQIRASAQRAAKGQPHGRPRVFGYEVDGVTPHPVEGQILRDGYAHVLSGGTIRALTRDWNARGIVTARGNAWNGTEVRRALLRERNAGILVVRGEVQPESQIASLVDMATWEAVRAMLKDPTRVQSGPASGERWLSGVLTCTCGERMLVATSWSGGVGSPAYACRALRVASRTGAKREGRHGQIVASIVEEGVVLEVLAALIADAVRGESGAVPEAADVIAARKELSRIEEERRVAQELYMLPGADRVHLATRVATLGQQRDAADAALSEALSQRSAADVVAAMQEAVRDILAGAPADDESRGKAIRELWDALPVDTRREVVRSKLDIVVTPGGKGSGHGMRRVAVHPRTRSQARSV

SEQ ID NO: 749 - protein, 552 aa, synthetic construct
MRKAYSYIRFSSKAQEEGDSLRRQTESTKRYCESNELELDNSFQDLGKSGFRKKNGNSEQEALNSFIELCEDGQVEDDAILIVENLDRLSRDNVKSALQQFLKILDFVDVYTLQDEKLYKKNSKSIDFDLIISITIMSRAHEESSTRSDRLSQAWSNKRKNLTQVKATSNGPHWLKLSKDKTRWIITQDRADVIKLIFKLALENSSNKIVKYLNDEGYKSPRGKLWAKTSVSRILTDKCVLGEYQPHVGRGGYNRTPIGEVIKDYYPRIIPDDHFYAVQAARTSRKQNERGRGVEKFSNLLRNIAICKHCGSPMEFKDKGAKPKGGKYLTCSLAARTSMQCDHDAHISYPEIEKAILLLLARKKLINNYKKTNKKRIDALALEGEKVIKEKNLDSLLKTIESSDSPSPKIFEFIEKINTQIAELEQKIIDMKIEDAKDKTEINLNAIIHDITNESNNEIRVKNRKALNKFLIENLGKAKVACLNPETLNSKKRIVEVNFNKNNNITLEGYRYVHLNNTTYIDLKDSKQALQTIEFHSKHKTRRVIPLFKENS

SEQ ID NO: 750 - protein, 477 aa, synthetic construct
MKDSKSKTVIIYNRVSTIMQDKNESLTEQTDECIRYCKTNGYEIYKILKDVKSGTKDDRAGYLELKKHIKRRDFDILVVLETSRIARKMKELVLFFSLLNENNIEYISIREPNYNTTTPDGKFAMNIRLGLIQFERDNTAERVTDRLYFKASKGQWVNGKPPIGYKLVNKRLEIDEEKAEIVRNIYDDFLNGYSLNQINNKLQFSWGSKQVKRILTNPTYKGYIRYGARSNRKKNNREAFIVKGWHEAIIPEDKWEKVQEMYKSLNRKASNTKPTLLSGLLKCKECGNNYIRKRGGSYDKNLYYGCNLNNLRYSDKFFYKDIPECSSATIKGDLLEKAVIDTLKKQINDLNFNDIEIDKKRQVNIKQIDNSINKFKNRLNKIYELYIEDEIPKDKYLKDKKDIEARIISLEKQKKSFGEIEVEKSNNEMIQEYFSKIDLSNIEEANRILKIIVNKIVVYKKKKTPKDDFEVEIYLNI

SEQ ID NO: 751 - protein, 451 aa, synthetic construct
MKAVIYARVSTEMQEEGRSLEFQIRKCEDFCKMSGYKLKEVIQDVESGGNDNREGFLKLQQEIKKKSFDVLVVYESSRISRITLTMLNFVLELQKSNIKFVSISQSEINTTTPTGMLFFQIFAVLADYERKQISMRVKSNKWARAKAGIWQGGIIPIGYKKDEHNNIVIDPETSEDVISIFNTYLNTKSISETANIFHRNISSVKWILQNEFYIGNLMYGRKENNINTGEVKINKEITIFKGNHQALISEDLFREVQRQMLFKQRVIRKDGKFLFTGILECTCGGKMFKNGVNYRCDKCKKAISMKKAEKFIIHKLLNLKELEFLNEKPDLEKYKKDRENIDKQIKKIDRERTKYLELFTKELINEFELNDKLEELKNRKRVFEDSLNDIDRIIKDKTISEEKLDNIKILKEVLENMDETDRYNLFLMFRMLIKRVKIKKYQPLEVLILLN

SEQ ID NO: 752 - protein, 527 aa, synthetic construct
MSAVRLSVLTDETTSPERQRAANEGAAAALGIQLSPEREAVDLGVSASKTTPFERPELGAWLTQRADEFDALCFWRFDRAIRSMADMSALVDWARAHRKMIVFAEGPGGRLVLDFRNGVDLITQLLIQVFAFAAEFEAQSIRERVTGAQAAMRLMPLRWRGSRPAYGYAPAELEGGGWTLTPDPEAVAVIERIIKELHDGKSVSAIAENLNNEGVPSPRDYWALKKGRTTGGKTGGAKGESAQRDRFRWTPAVITRLLRNPNLLGWKMHKGTPVRDDKGAPVLITNDPVLTREEFDAVGALLDARSIDNRERKDTDALLLRVIHCDSCGSRMYLNKQVSKKNQAPVYKCNAHGRGVRCDAPAHVRGDWADEYAEREFLRSVGGLRVTSRRVIPGYDPQPEIEATSAELEAHMKARDLFNNPVSEGIWNKQAAALNARLTELLTREATPERVVMEDTGRTYADTWAHADTAKRRAMLVDAGAHLSVKRGTRGGWRRLDESRVSFELRQGFFAEADDVLNGLTAELAHP

SEQ ID NO: 753 - protein, 506 aa, synthetic construct
MLIKTVAIYNRISRDNGESEDVLLNHRTINTRLCESKGYQYKLYEEIESGGKFEERKILLQLLRDIAQGLYDGLVVVELSRIARDNLYSQMIAKVLEDNNVPIITPNRIYNLSDESDRLMYDMESMISSKELRTITRRMRSGKLEGVRRGEWVQGIPPFGYKRGDNKKLIIVESEANLVRQIFNYAENGYGVPNIASKLKGYKTRAGNSFTDTAVYAILNNKTYMGSIIYNVKDKKGNITENIVARNAHEAIITREQFNSVQQAIKGRMSGDMETRNRSRGIVISMLKDLVYCKKCGLKIKFRKDSKQRNAVYITACKCGNRGIAEHQLLKSFMNEFYFLQGFYREEWEKALHTPQTVSKGVLVQQVEELDKTRNKLSMRLSKAKEAYLDGVFNKEEYLTTKDATENELKKISTAIDDLLQDIESMDKESLASQFESKMKKIEQFYKIYNKEDSHQHLAECNRILKLIINKVHYERVNERITITSPLEGYMEVEQGDFVDLSIDSK

SEQ ID NO: 754 - protein, 571 aa, synthetic construct
MPRRKQNPQSLKETVSTAIKKIVWRVAIYIRLSKDDGNDESYSVKNQRERLNDTLEQLMLDEDGIEFVGYYIDDGFTGVDSDRDDFQRLLTDIQNGKINCVLVKDLSRLSRNDWECKYYLQMLFVKRNVRFISLELPKLDSFKRPEEVYDINVSFQSMYNENHCRETSIKVRGTLDKKREKGQFIGAFAPYGYLKDPEDYHHLVVNPETAPVVKDIFRWYMEGMSKSAITKELLRLGIPSPYEYKKQHGAKCYNPQAAKKGGVVYWSTRTVDQILHNPTYIGDMVQGRHKVTSYKIHDIIPVDEADWFWVEGTHEAIIDADTFTKVQDLMSRNTRVSPNRSNLYLFSGFLRCADCGRGMVRNSAHGYSYYSCRTYRTLSKDLCTGGSHNIKEDIIAEAALKAIQAQIALVENMAEVIKEINSAPTRVSRTIFIDNLLKDKERELQKTAGISDSLYMDWKNGDITREEYHRMKARFQTEAEQLRETIANLQAERQEYEKEVTTDDPYLKTFLQYKNIEKLERNIVVDLIDAIYIHADKGVEIHFKFQDQHKRLMEFIENNLAAARRAKIKAV

SEQ ID NO: 755 - protein, 633 aa, synthetic construct
MTVKEAAAKIILRVAIYVRVSTRNQEDKYSLAAQEHDLVEYANKQNWHIVEVFKDVESGAKFDKKGLTALMDCVDDGLVDIVLVADQDRLSRLDTLNWEELKLVLRENNVKIAEPGLVIDLENEDDEFRSDLYNIIARRERRLFRRRSQRGLRQYVREGGIYGRVPFEYVYDKETKEVSLNEEFSWVISFIDELFLQGYGPSSIASHLNKISRTPNGAKWHANTVYQRLLNPAYCGEYSVTFMNGEKITIKKKYPLLRTVETFERIQHIIKTNAKPFSTTRKHHHPLAKLHISCSECGRKISLQQGDKSQYGGYRWYLAHNHGLAEPCPYDPKYNAVRITRPLVLAIKNILLSEETAKRYLDIEFKDESQITHLEQQASNIQKMMSDNNGKIDKLLDLYLDNKLAKEKYEDKTKSIETENADLKASFEELNMKINLMKDEKYSYDALLDNLAVVEEHLSTIYRIDTEYSEKDKEDLISALFEYALLSPANNTITFKFTTINDFPIDLKINIDETNLEYEERLLQQQRERYEATQAILDAQPSPISFMELKRLSGLNAQTLRLDEERFGPYSNLKLGKGSPERKAEIIEGIKRLITVNPNMTSIEIAKELGSSQGTILKYIRENNLREGRQHKG

SEQ ID NO: 756 - protein, 480 aa, synthetic construct
MRVGTYRRVSTEMQREDGVSLQTQDERLNAFIQSQGWALVEDYADEGYSAKNMDRPSLKRLIEDIKRQKIDVVLVYRLDRFVRSVSDLHHLLQVMDKHDVKFKSCTEVFDTTSATGRMFITIIATLAQWERETIAERVFDNMLHRSEQGKRNGAPAPYGYNLEDGILTPDENEATWVRYIFQKYKTNGSQNIAKYLNVRGIRTKKGEVWSDYSVRYILKNPIYAGYVRWNLRSAAKGKNTETVIAKYEQKNFEPLISKSDWDDIQELMKERSFMAFRSDNHYPFSSIAKCEECGHSFTGAFKKRKSGGVHRFYKCAGRFRTGTCKVTVIAEEAIEKAFLETMYFSMYDEKEYLAEKEPEIDAQQIQKELVHIEGKKARIKELYVDGDIAKEDYKKKIAELQERENDLLLQLETEDVRASEEEVRMWISSVKANWNTLSYESKKAAVHAIFRSMTIRVIEPPKVGKVAAPPVVEIVNFELR

SEQ ID NO: 757 - protein, 524 aa, synthetic construct
MYSTVKLPSFYNVGIYIRLSQEDEDKAYKRESESESVLNQRSLIMNYLRDNGFILTDEYVDDGYSGTNFDRPAFKRLLEDIENGKINCVITKDLSRLGRDYIKCGYYIEQYFPLKKVRYISILDNVDTFLDSANNDIAPFKALFNDMTSKDTSKKIKSILRDKKVKGKFIGSKPSFGYMRDPLDKGHLVPNPDTAWIVKRIFNEVSRGDKISDIIERLNNENIPTPSAYKQIKKSKRQINGYIWTCSTINKILKNRMYTGDMIQNVQTKLNYKSQKRICLSSEYWIIVENTHEPLVDRVIFNQIQTSANRTRTVKLNRPQRLLEGLLYCKECGNKLTVSYREKRNYWSINCNKYSRSPRQRLCEPHFSEYNSFEKIILNQIKKTCKKYINKVDIDNLISNVKSEKDNKENLIIEKQKLENNIKELQLKIDALYEDKYNGIISVDTYTRLSSNTENLIRTYNYRIKELENSINEVPKKHNDEEIKQKIKELICMKKPTRELLFILVDKIIVDKDKNVEIIYNFNK

SEQ ID NO: 758 - protein, 597 aa, synthetic construct
MSANQKPRAYSYIRFSNATQAAGDSYRRQREAAEAYCAQHGLELVDAKEYSFFDQGRSAYKARHLDDTGELARFLAFVQDGTIPKGSTLLVESLDRLSRERVKDALPRFLDLLNQGINVVTLADGRLYTSAYNELDLIISIVQMSRAHEESATKGKRVSAAWRRKQDSARTESLPIGKLRPLWLDYTPDGYVPNPERVEVVQRIYKLAQDGYGHRAIAAQLNQSGVPSFSADRKNASGLWGNSGIARTLSNRAVLGEYQPHQFIDGKRVPVGAPITGFYPPIITEDEFYAAQQAVSSRRQSQATKPGKRFNVWQGVSQCGICEGPMHISKRGNSRILRCFRNIQGLCPAKPILLPRSEEVFREILAKVDSLALVQSNQGKLQRQIAVCDGRIAEAQGRIESLQSQILNLSGALPVSIISVMQRLEEDLSRHQQERDSLKEDIAREQIINKDEFFSRLDLVSYEGRARANSLLKSLNVEVAIERIGELRGKKAPVHYRVSKESLPIFSFLDTSGELEFLPLTTPSIAIAEVQGEVIRPEFHQYVLTRERQFAWEASERTRLEELCKTSSFKDVASAEGISVRELKRILAGERSNRSAP

SEQ ID NO: 759 - protein, 538 aa, synthetic construct
MPVAFSYIRFSSAEQAHGDSLTRQQEYVAKWLLAHPEYVLSGASFQDLGISGYSGKHLENGFGKLLAAVENGVIKSTDVVLIEAIDRAGRLEPSVMLHLLTGIVNAGVKLITLDDGVTYSNDPNNSNNLFLLVAKVQQAHQYSDALSRRIKDAYTRKREKAAAGNGVKRHTPIWLTSDGELVEGLASIIVQVFEDYADGLGERRILSRIRSKHPLVEATNPTTLKRWLRNPTAIGRWNDIEDVYPPVVSKELWYRVQKRLTEGYRPRSAPSKYLLSGLVRCGRCGTNYCVVDTKRSPAVMLCYRRHRKGADGCANGRSIPMHVLDFVRSRTMYGAMQRAAASQNLTSGEKRLIEIEGELAELQRQSSNLADSLAEFGMLVPIRSKLEQVTTSIQKLEQERALLKVAPAPVTLGDMIDLQHTLLDDDQMRLNALLQSVGYVIVCDGTTITVDEPHLQTEGERQVYEYRGSHRATETYRLIENNHTEHHLDMPNSKRVEVMIEQDRKDEAEFEQLVTDGKVSPIVYQYDEGTDKFILMPR

SEQ ID NO: 760 - protein, 556 aa, synthetic construct
MALAFSYARISSKKQLGGDGLRRQIEAAEKYALEHGLDIDTSLSDVASGFHQDHVKFGALGGFLELVKAGKITVGSVLIVESLDRLSRADVLTAQSQLIDIIRSGIDVVTLADKYRYSRNNDFSQLIFSLMSMARAYDESQVKSVRGKAYLAQLHEDVKAGRKARVHHLPSWLEQTQIGTSKEYEFTLRESASTVQKIFELYEKGYGIAKIAIWLNDNGVLTLQESRRPNPDHTKIWRRKAVGEILNSVAVRGDLVIGDTIVEGYYPAAVDPVTWWRVNDRYNNKSTKATNGRTGLGYTNLFSGISKCFHCGGPARVIGGGSGHRYITCEKIKETGELCTGKGKYGKTSLRYDILEKAILDNVATYCHLPETPTVSSDDLKRQVIEIQTGIADIDRRISNIIAMSEMADHPDDKTDLMTRLKALRSDKSRQTAEVERVTSEIRSLETVREDFTTLHQTIEDERAKWDTLSGDDLFQSRSLVNSKLREIVSVVSIDAVDQSAYVSVAGATRIWEINAKGEVTRSTDFSNLSEEALLKMASGVGLKTSHEAIQRVKRI

SEQ ID NO: 761 - protein, 512 aa, synthetic construct
MRCAVYARVSTGLDSQKDSLENQVSFFENFIREKGWELVGIYADEGKSGTSTVKRKELQRLMKDAEQGGFDVVLIKSISRWARDTVDSLTLVRKLKSLGVTVISAKDGYNSSEDDGELRLTIFSMLAQSQSEDISTNVSFGIAEKSRKGVFHGTPPYGYDKIRGKLVPNPLHAPTVKLIFRLYLEEGWGMQKIANYLNAHNIPTPRSVLGAKNAGDKWHDTAVKIILKNPNYTGDLVQGRSKVDFKDKVYNQQRGYKKRIVLEQDKWIIVPNAHEALVTKEEFEAVQEKINKKAEKVFRGRGTKSLFARIAFCPDCGAGLNYMYDRKGYICATYKKNGSKRCSKHYIKHELLKERVLMDIRELASNSLNMKSLVQLALKRAGNKMASATDELQRILRELESLRREKNELLRLLTRQVIDQATYEDQFQFIDKDYKALLHRKMELEELLSKEKDTETSLSAFQKEIQQFAQLEMPDEETLRQVLHKLIDKVFVHENGRIEIHYNFKNPMLKGA

SEQ ID NO: 762 - protein, 555 aa, synthetic construct
MPAAYAYIRYSRAVQQTGDSENRQYTALELFEYTTGIAIAEIVYDRGKSAFRGDNAKTGKFKEILDRIEQGSIRKGDFLVVESIDRITRQRVLDGVELLQGILKKGINIYTTTDQKTYSYNDPARDFENLLMISLIAKRANEESEIKSKRLLSSWNKRREKAQSGEIIIKKGNSIPYGLRVVNGQFTIDEEEQKEIQTLFEFLLTYGINTAIKKINQTSKKVWNNGTLNKIIASKSVIGCLATHRMSYENGKANKIPTGFIENYYPNLISPSLFYQTMDKMKERKIKNYNGRRTEQDFNIFKNQIHCLSCGGKLYYDHRGSRYKGKIYPHFKCDTKRVNPRQCGTDNIRFEYVFGLLLKSLEKLKKTTDVWRLLEIDEGEAGKNNLLNAQFNSLLARKPSVDTNTLINEKSAKLGQYRTTYDNLSISIRDFGGRIPLPVMQQLAETEARIEELTAEIEALEASSPTGIEIDDYQTIINLFMTEEGRAKINSFFKENDIVFYAEHDKQSTLSQLRITRRSSDAEEELIHTSAFLPKKQILKEWNLTDLQEMFDLTV

SEQ ID NO: 763 - protein, 514 aa, synthetic construct
MGDAYYYEEVAPEQEIKKVAIYARKSRAEEGEKDLANHLFRLESRCKLNDWDYTIYKEIGSGGNLSERPKMLKLLDDITKGLYEAVVVVDIDRLSRGKGADLDRILGTFRNNSVKIVQESPYEIYDLTNSNHAQVLEMKMFFGNMELMQSKKRFKEGKRLALYLGKWVNGNPPFGYELDRKTKEIVINEEEAEIFNKMKEIFFETWNTTETAWRLNSEGYKTKTGTTFTGSRVAMHLKNEFYVGTFVYNKSEGNRKNSSEMYSSGIPYRKLDKSQWKRKEDNHPALLTKEEHQKIINHFSKTGKRSTNNKNVYPLTGLCVTPTGETYTLRNDKGFGSPNKLVINKRKYEEKTAYRSVEVDLVLNTIYTSIATLKEQIALKLEDNNNEEEIKMLNKKCYALEREINKITNAIEKIQEGFIFGLYDANEAKNLKTKQEGILQTKEEELNDLNIKINKLSNTSNLKLDRLRRVENFMEDIKQNHTDEKLNEIFKSIIKDIVVSKLDDSNVDIQVNFL

SEQ ID NO: 764 - protein, 613 aa, synthetic construct
MTQGVVTGVDTYAGAYDRQSRERENSSAASPATQRSANEDKAADLQREVERDGGRFRFVGHFSEAPGTSAFGTAERPEFERILNECRAGRLNMIIVYDVSRFSRLKVMDAIPIVSELLALGVTIVSTQEGVFRQGNVMDLIHLIMRLDASHKESSLKSAKILDTKNLQRELGGYVGGKAPYGFELVSETKEITRNGRMVNVVINKLAHSTTPLTGPFEFEPDVIRWWWREIKTHKHLPFKPGSQAAIHPGSITGLCKRMDADAVPTRGETIGKKTASSAWDPATVMRILRDPRIAGFAAEVIYKKKPDGTPTTKIEGYRIQRDPITLRPVELDCGPIIEPAEWYELQAWLDGRGRGKGLSRGQAILSAMDKLYCECGAVMTSKRGEESIKDSYRCRRRKVVDPSAPGQHEGTCNVSMAALDKFVAERIFNKIRHAEGDEETLALLWEAARRFGKLTEAPEKSGERANLVAERADALNALEELYEDRAAGAYDGPVGRKHFRKQQAALTLRQQGAEERLAELEAAEAPKLPLDQWFPEDADADPTGPKSWWGRASVDDKRVFVGLFVDKIVVTKSTTGRGQGTPIEKRASITWAKPPTDDDEDDAQDGTEDVAA

SEQ ID NO: 765 - protein, 597 aa, synthetic construct
MATLKHLGSKNADYGAAEQYLLFEHDEFTMKPVLDENGRLIPREDYRLSTLNCGGEDFAVACMRSNLRYEKNQRREDVKSHHYIISFDPRDGPDNGLTVDRAQALGEQFCKEHFPGHQALVCTHPDGHNHSGNIHVHIVINSLRIEEVPFLPYMDRPADTKAGCKHRCTDAALRYFKSEVMEMCHREGLYQIDLLNGSKNRVTDREYWAQKKGQAALDKQNAPMIAGGITPRQTKFETNKEKLRQTLRKALATAASFDEFSSLLLREGVTVKESRGRLSYLTPDRTKPITARKLGGDFDRTAVHLLENREYTGCLINFKTEKPSYKVKHSVENPIEKQAIFPNHHEPIIDTETWERVQELRKQRKRPNRYDEVGLFSGMLFCADCGHVLYQQRYQNKNRKQDCYICGSYKKRTRDCTAHFIRTDLLTAGVLSNLRQVTEYAARHESRFVKLLIQQNEIGGKRKTAAATKQLEQAQTRIAEVNRIIKRLYEDNVSGKISDERFMELSADYEQEQRELKDRAAALQEELSKSQAATVNAEKFMGIVRKHLAFEELTPTLLREMIEKIVVHECSYDENGTRRQDIEIYYSFVGKIDLPEA

SEQ ID NO: 766 - protein, 540 aa, synthetic construct
MVHYVPTKRAGSLRTMGAVALGQLRAVVAVRLSDFTDTSTSPERQTDAGNEAARDLGARVVGYPVDLDVSASKTTPWERPQLAEWLNKPDEFDVLIWWRMDRAVRSMADMSALGHWAREHNKRLVFAEGPTGGRLELDMGSATGELMAILMAFAAQMEAQAIRERVTGSRAQLRRTGRWGGGQPPYGTQPIPNPDGPGVVLGEDADAVQVLRYGQKLLHAGMRPHPIAEHLNGMAIPNATRHFALKAGTSTDKAGNWTGFAFKKIMRNPALLGYAVHGGTIVRDERGEPVIVGPEIFTREEFDAVGVILDEMENPNADKRPRKDSGSRMLNVGFCGGCGGKLYPTKPTKKAARRYMCRKASAGVKCARPVSIRADWLEDYAEREFLKRFGRMDVVRVVSHGGYDPGPEMDEVTRELRVMIARLTEAKTRTTQAVWQERVDALEARAATLEATPVTEPYEEQIPTGEKYAAMWHNADDMGKRRMMQDAGVRIVVQRKAPAEGKTRTGRVTRLDESLLSFDVATNRDPVADAEAEALYQATS

SEQ ID NO: 767 - protein, 501 aa, synthetic construct
MKEYRAGIYLRLSREHSEENNSIEAQREITTNYAMKNNYRIVKEYADNGYSGILDSRPALNEMMLDISRGFINMVIVKDISRLTRDKNKTGWYTEIFFPDNDVRFISVTEFIDSGDRYEIDDTIMLRGIANQYYLTDISKKVRANKKAMKESGQYVEAHAPYGYKLSIEDKHKIVIDEKVSNNIITIFNMYIDGRTSGQIAKYFNSKRIRNPSRYLKMKNASNKWSSETINDILSNPFYAGNTVMNKYITNYMTKTCKKNKNKDTWIIKENTHEAIIPQEKYNKVQDIKKSKFSKKENEYHFLLKDLLYCGHCKHKLQYKIYKSKDKTTYLYNSSGFICSIVYKKPDKCKNKVFINEKNLNEIIKAKVKERLGQIEIDKTTNKIIDYFKENSKEAQELKQCKNELEKLNRKKSILYRKKCDKYITEDEFKEEYNRVKKQISELQKRKEELEKNNSNIDINRIREIITEFQSGKDMTNEFLKEIIYHIEIYSNDRIDIIFNL

SEQ ID NO: 768 - protein, 479 aa, synthetic construct
MAKAKTAGQRIGVGSAAIYARISADVEGTGLGVARQLEDCRKLAADRGWPVGAEYVDNDVSAFSGKPRREYARMLADLGSGACDAVIVYNLDRLHRRPVELEEFVALCESVGVRDVATVTADIDLGNDDGLFMARIFAAFAAKESGRKSARIRRKMLQNAEQGLPHGSVRPFGYEDDKITLRNSEAAVVREMVDRYLAGQSLLSLTVWLNDSGVSPAVAKSWQTSAVRQILCSGRIAGLREHRGEVIGPAKWPAIITPAERDRILARIAARAVTKTRAARTYVLSGMLRCGRCGNRLYSQARHSNPGHRVRRYVCLKGPDHGGCGRLTVVAEPVEALLTDAVLTRLDSRDLAKVLAGKASPNHDVAALAAAVEADQTRLDELAGLYADGAISAREWIAARDPITSRIQQARRDIAEATDTSEVYELAGTGGALRVRWPDLDVERQRSIVKSILDHAVIAPGTPGSRSLDINRVQPHWRI

SEQ ID NO: 769 - protein, 499 aa, synthetic construct
MEKERAVLYARISLDKTGDEVGVQRQLRDMQALAQVRGYDVVDEIAENNITASKDLYRPGYEKVWGLVRSGQVDHVIVWQTSRFVRSRKERAEVIEQFGKHNVDVVAVKGPSLDLRTAYGRGLADVMTAFDSMEGEVKAERVSAAITDLARQGKGWGFTPYGWDVENGVRVVNQHEAGVVVELVDRVLAGESLHEIHRDLTARGEPSPGYALWMKLPEAEREKRLVTKRLKRKPTPLWPRSAIRTLISRDANIGIRRYSANGTEMEAVGDWPPIVERAKHDRLRALLSDPRRRSHTGPRPGGRKHLLTSGIGRCGVCGSDLRVSVRRNRRGQNEHYYSCSARGGCTARKQDFVDEMVTRTLIHRMSRPDALDWLTIGDDEAAQKLADRIAELQGRLDDVADSFARGAITARQMERITGQLTPDLAEAQRERSATARAVDRELLAPLAGEKAETRWRALAVSRQRAVLESLGVAVVLKRRNKPGPGVEPESIEITWGGTS

SEQ ID NO: 770 - protein, 543 aa, synthetic construct
MQVVIYARASSDSKGRKISVASQIEIGRKWCEQVGATVVAVLVDNDLSASRYATETRGDYEEALRLLATGQANCLWTWENSRAQRDMKVFMRLRGLLEELGGYWAYDERVYDLTDADDRIAVTEDAVDAERESEKLRKRVLRGVEARAMSGLWAGPLSYGYRVVYDQDTGDAQREIDESTYLHAREIVLTLTETRNESALAKDLERRGIPCARATQWRADHVKKLYALSQDAEGWAKFIASLEPEQVDSAYEALVRLRTESASQVAKDMNKGHWAHPLPGRWSAGKVRNIGLNPALAGLRVFRGKVIGKGTWDAIITEEEHDNVVAALGNPNRENVKDGDRVKYLLTGILLCGKCDTGVSTSLRKGKMTYRCNTGHVVRNMAKTDSVVVERVLRRLSSEADQELFQYEGQAKELTAAIQLAQDLRARLDGFTDKAAEGELSPERLARIEQKLVPRIKEAEARARQIGVAPAVAKLVGPDAAAVWETLSVRQKREVIRALVRPRLLPTTGGAAPFNPDHVRMSWLGQPAQIPGVDYEVEDDAAA

SEQ ID NO: 771 - protein, 576 aa, synthetic construct
MLIKNTGADTIGTSNPVLVDCPPMKGAETMLRQSDKITALYCRLSRDDELQGDSNSIVNQKAILSKYAKENHFPNPQFFVDDGYSGANFDRPSWSELVALIEDEKVGVLIVKDMSRLGRDYLRVGLYTDVLFPEKGVRFIAISNGIDSAQQQENDFTPFLNIINEWYCRDTSKKIRAVMKSKGEAGEHLCTNPPYGYMKDPDNKKQWIVDGEAAEVVKRIFALCLDGYGPSQIARILKEDKVITPTIHFQQTGRATRNAPPDNPYNWTSDTIADILERPEYQGHTVNFKTYKQSYKSKRTCYNPEEKWLVFENTHEAIIDADTWARVQELRKNKRRPARTGKTNMFSGIVRCADCGEKLYYCTSKNFEARQDHFVCSTSRLKGKAVCSTHFIRAVVLEQGVLAHMRLTIACVANHEEQFRKAMGAKQKAEAKKELAAKRRQLTQAERRIEELDRLFKRIYEDNANGKLSDSRFQMLADDYEQEQEELREKLLRLNEEINEQEEQSENIDRFISKVRKYLDLDELTPAVLNDMVKAVYVHAPDKSKGHREQQIDISYDLVGILPASLLNNLQNGETA

SEQ ID NO: 772 - protein, 514 aa, synthetic construct
MNTVDFYLRLSLEDDDLKDESNSITSQREILKNYISSREEFTGVKIREHIDDGYTGTNFNRPAFQKMIGLMKKNEIRTILVKDLSRFARDYIESGAYIEQIFPFMQVRFISVNDNYDSNNNENGISSLEIPFKNLVYDYYSKDISQKISSSVRVRQDRGYYFGSKAPYGYVKDEKDHHQLLVDDRVRNIIEEVFERYLSGESMLSISKDFNHRGVLTPAKHIGLKRGSGVWTGQIIRYVLTQRVYTGAVVGGKTRVQEVGSDNRKWVDSKDWIIREDMHEAIISKEDFGKVQDMLNSNAKLISRERKHFHILQDKVYCGKCYHKMTYTVNYGKTDGYCCPYRYKAKDCGCMKGKIKAETLEDIVSEEIKLYTESFLEKEQTRKIEHKVMESICESLLYRKKRLEAEKQKIQVSKMQLYERHKQDEIDKEAYLSKKEDLSKKLKNTEQEIAIITDKIKENTSSGHNLNVDKLREAVTKGELVLDWINEVIDRIYVYGKDKVEIIWKFEKGNGKDG

SEQ ID NO: 773 - protein, 484 aa, synthetic construct
MNTSTATTGERVALYARISQDTSGQAVGVADQLDHARTFATARGYQVVAEHSDNDISAFRGASRPAYQKVLTLARDRRIDRVIVYHLTRMTRNRRERAEFIDAFHSCKVNVSEAQGGDYDLSTAAGRTWVDIQGALATWESEIKSERVTAAAARRARSGRPSGDLGYGWAKQGLGAAATWTEHPQEAKVVREIVDRLLSGDTLRGITADLNRRGEPAPKTTAWGKTSVKKLAMRESNIAQRVHHRGLPDEERFDGCWPAIVDRVKHEKVVALLTQPARRTNATVSRPGARRHLLSWGIGECGICGAKLRAVTKRGRHGRPLELYVCDGKGCIGRSEPSVDELVREVVIARLAQPDALDWLMGDDEQARRYSDRVDELNRRLSEAADAFADAAISAEQLRRITARIQPELDEAESRLRDSVVSLDVEAIRPLAGPAAQQRWDQMAVSQRRAVLEALGIRVVINPTRPGPGFDPASVEFRWKTQAS

SEQ ID NO: 774 - protein, 496 aa, synthetic construct
MKVAIYVRVSTDEQAEEGYSIAAQRDRLLAFCMSQGWEVVGTYIDDGVSAKDLERPELKRLLNDMESALFDVVLVYRLDRLTRSVIDLYTLLQRFERHNVKFKSATEVYDTTTAMGRLFITLVAALAQWERENLGERVRFGMEQMVREGKRPGGPVPFGYAPDGITVIEEEKEICRELRRLYMVERLGFRSIAVNLNQRGMLKRGEEWAAQTVWYVLDNPFYAGKIRWGERNKKGTYTSRKKEDHVNCIYQDGQQETIFTWDEYEEHTLRMKRRSFNGYTKVREYWFAGVLRCAKCGSRMTGRYHQNKRQDGSYRKILSYICANRQQGKGCTMPMFRQELVEHLLKEYLRKIKLDFGKMKDISAKTNDKNDDIKKEVEKLRAELRKVEERSKKWQYMFVEDLITADDLRKRKAEDQMQREAIEKRITELSNMTEEVNEHKQMMIDLLDMWDVLEDGEKNDIIQTIFADIILDTPLERAHGRKGQFIPSSIVEVKYN

SEQ ID NO: 775 - protein, 511 aa, synthetic construct
MESIAYLYARFSTKRQEDGDSLERQTLAAQEWCARNSVKLSDKTFEDLGVSAFKEGTRPALSEFIQATQTGRVHRGSFLLVEDDDRLSRRGWKVTQDLMHELVNLGITVVLLKTGRKYDADNIHDIGDNIILMVNADRAYKESERKSHLIRAQRKRARENRKVTGKLPAWIVRADTETGFDFNDKISVIRELIEVRSQGHSFQYVAKQLNAKNYTTGTGAKWSASGVRSIIQNHALYGAKAYFDTDKSSGRMNKHPIDIALDVFPLVINFEQWLSLQQKSKTGKGGRTSKRGAYSQLLRCGNCGSGMVQRTTTYKDQKRLYRKCISAVEGKCTQVEAVREPEIYLDKVLKDLTYKVIESGFVSKTPELKQQLETLEKTQDILIQNGMAEQLADLYVKMNEIKSLIDKSMEADRKSAEPVETSFSKILDIHDSTKRNIELRKLLDSVTFVLHAKVKTRSQWHVIIKQMNGYETSFLLDQKHGFGNTKIKFVANQEKLAKLESLIPEMEPWEQ

SEQ ID NO: 776 - protein, 406 aa, synthetic construct
MVGAPIFKEFIISVTKHSPWASKPDSLASAIFRYNSSLLGFDSALNIFAACCEFSHLLVWKIDRISRNLLDFCSMYDELKKYNCIFVSKNEQFDTSTAMGEAMLKIILVFAELERKLTGERVTSVMLDRASKGLWTGAPIPPGYKWDETIKFPIIDDEEKNTVDIIFKTYSKTESSSAVTKLLNTNGIKTKRDGRWTTKTICDVIRNPFYKGTYRYNYRIPGHGKVKNQDEWIIIPNNHAGIISEELWEECNKIMDINANKNSARFRRTSKIHIFAGLLECGECNNRSDKTSLDGFTPGLYTCSGRYNHLGCSQKTISDTIIGNFTLNFISNIIKSYKEKGSSISLDDLERKLLSGTCFKDIVGISEIEDLYNSIFYSQSNTFKPYKEGKTESNIIDIDSNKFEAE

SEQ ID NO: 777 - protein, 581 aa, synthetic construct
MYGLNSDFQKRDVAIYARVSTEHEAQLSALGNQLDWYKPILAARPDWTLTAQYIDEGITGTSAEKRPQFMKMVEDARQKKFNMIITREVSRFARNTVDTLQYTRLLKEYGVEVFFLNDNIKTFDGDGELRLTIMATLAQDESRKTSIRVKAGQETSMQNGVFYGNGNILGYDRVGKEMVINPEQAKTVRMIYDMYLSGMGVTTIQYELEKAGRLTALGKERWFASYISKMLRNSFYCGIITYHKEYTPDFLKQKKIKNYGDLEYVQVQGTHEPIVTVEEYEQVQKLMDAKSAVLKNHNKGKRRTGRMQHTTVYGRLMICQCGNKFNLRFHSRDGRTDGVDYQCYTSVNRGSVAKRLNKGISIEHSCESPYIQGWKLEMMAEQVFDRYIENADKVMDLSYAMLEKHIADQEELPDNTDVIRRKQGEIEKLMNKRTNLIEMRAEGDIDKEMFRSKKQEIEDRVAKLTEEIKGLQPEKEQTSNEDYSVKLLELRERLKEYTGFDYSVIPESIVEAFIERIWVSKDEFRWYLRTGNNADGEFDPDDHIKIGAFTLTIDDAKKYIYSFSTRRRVYKWADLNVSVWI

SEQ ID NO: 778 - protein, 514 aa, synthetic construct
MRKVYSYIRFSSTKQAFGDSHRRQSKAIQDWLASHPDHILDESLSFEDLGRSAFHGDHLKEGGALRAFLEAVKQGLIPPDSVLLVESLDRVSRQSISHAQETIRAILEQGITVVTLSDGETYNRQSLDDSLALIRMIILQERSHNESVIKSDRIKKVWSHKRQQFEQDGTKITGNCPGWLKLNSDGKSFSLIPHHVETIHRIFDEKLSGKSLHAIARDLNLENIPTITNKKVDTGWTPTRVRDLLLKESLIGVAYGVSDYFPPAISKEKFHAVQMIRGQGKGKKPTSRQPSSIDIFKGICKCAECGSTLRQRNTKKTPEGRYPRGYLECRNRQLGRCNSKAFNRSLIEDILIQKVFPTLQYLSLKSNGDNISVTTLKADITSLEKGINNLISLAERGLGDLDTLAQRITNNRVELESKKKDLRQAEAIQSLRSDNDIQDSDRKTVEGRIKLQLAIKSFIKEMIFDYYKQEITIRLLNGKSFSGISVARENKDFDHSSVFEVLQKSLLDIDEVHL

SEQ ID NO: 779 - protein, 532 aa, synthetic construct
MRISEELQALYNSTFGQGETGTVTAKATVHSYIRFSSSIQEQGDSITRQVAATKQWAASKGLEVSEQSFSDLGISGYKQNAKRDGLDQLLEAIETDAIKRGDWVSIEKFDRLSRQGIRHTTKLIERILDSDVNLVAVHDNLELTKDSLDDPVKVIQIAVYADTAHKQSEEKSYRVRAAKASQREAALSGEVTKRRLPWWISRDNDKYVLNENAEHVKAMIEMRLAGNGWRSIAKHFNEQQVLSRTGKKWSDNAIKCMITNRAVYGSYEMTDGNIVDNYYDAICSYSDWKILNSKYQNYAGGKSKTNAISGLVRCSCGSAMSLKMQSRTTKTTTHHYRTWICRASTAGACDNTGSVRDLDVIIKNVCGKLKYKKLGKAAKNNSVEIERTRDRLDEIRALMTDVNSAISVSELAVMAGSLQSELTKLLAQELEETTRDELKQLKTIADDTQWNVKAKQLIRSCTVTRKSKNVWHIKIIQKNSYVVNATIMRESQRKEIKVFYGNKEAQVDFRDEVTKTLFDGEEIGSYVNHETN

SEQ ID NO: 780 - protein, 605 aa, synthetic construct
MKKKAAIYARVSTDRQEYQRQIKELQSFAERSNMEVKYVFEEKQSGFNSERPEYNKLMALTKEDIDIVLLWELSRLSRKSIEIQSDIEKLTSKGINVYIHNKSLYTLDEQGNINPTTKLIISIVATIAEDEVRTSKQRSKSARQQYIINEGRSYTSHAPYGYTLKNKKLFINEKEANLVRRVYQLCIDGYSIYGIAVLLNSEGLRTRANVLWTQATINSMFKNTVYIGKPKYCISSVRRTSKVFTRQYSRKVLEYVTLDRPELAIISEAIYDKAAEERKKRRHRSLAIDIQPYLLQHLFKCPDCNRYYTFDRTTKRQKYKCARKYDKTVEKPTCQSPALERERVEFMIWESVKYYCIETMANTRKEEQQLPLLEEIDALKAKIENIDNMKQKIVKKAEIIVTAAIDLKIHYSNMPELYNKKMEEVDKLNKEAIKLDYERKRYKSQIENAKSQIDAINNVKDMSQYLKDVDFDTKYNLLHEVVDVILPYGTKDNCFLLEVRLKTGLKYYIGYYPIRAYYIQFLPSKGNYFVGEERSGYLEIINAKSCEHISLETEMKKYTIVEYINQMDIPANRYPALPYRLKKRDKFLKDMLQGYSKEQLLEMLQ

SEQ ID NO: 781 - protein, 498 aa, synthetic construct
MKRIAIYSRKSVYVENSESIETQINMCKAYFTRQFKDCEFEIFEDEGFSGKNTDRPAFKRLMKLCSIKSFDAVAVYKIDRLARNIVDFMNIYNELEKLEIKLISITEGFDPTTPIGKMMMVMLAGFADMERMNIAQRVKDNMISLAKKGCWTGGAINRGYTAERKADGKKYLKLENEEFIKFTFENFLNGYSMHTLSKMQKEVYGSYGLKGAISIRNMLRSPVYVKSSKDVSDYLKNKGFEVVGKEDNKHGYLTYGLVSKEPFAIVSKHEAVIDPIVWLKVNNKLDNIKSTALTKESKCYWLTGVLKCPYCKANYVLANTKGKTYYTCSTRLKRGANKPNTCQNRTYVNAVEIETLIEDLIKKLYSKKYFDSFFCKSEKVYEDNTLELEKKLKKNEKSIMNLVEKLALIDNSNSATKFITNKIEELSKEISDIKIKIEENKFNKLEIELNKSTPDIIYNNISNFSKCKTLEEKRLRLKLIFKSVYYDPKTKAIEVEFI

SEQ ID NO: 782 - protein, 493 aa, synthetic construct
MVTNNIIKNVAVYLRISRDKGENVDTLQNHRERLVRLCEDRGYTYTIYEEIVSGQARMEAREALNSLLDELEKYDAVVVTAIDRLSRDLEYSIHIFKRLEKVGIPVITPERIYTEQDFTLYAIESTLAHGEYKQIRKRMLQGKRDKALRGEIVASRPPYGYDSVMVDKKRTFVPNKDANTVKKIFNLAINGYGGKSISDITGKPYKSVQNIIRNEAYTGTMIYKDIRVDDAFTAIVDKETFKKANNAMKARFAGDREQRTRTKGKVRTILKDLVYCDNCDRKISFQLKRREVYEDAMVTKKCECGMPGVKEETLLAEFYAQFYWVELHFRKEWQKALETPLEDKKGIIEGQLTELTKKQEKLNRRLKNAREMRLDGELSKAEFEETKAESEKELIALSSKITELSDELSTLDTAKLSQGYQEKLKLIGIIKQELNLPEGKGQLNYTKIEECTNKEEANRLLKLLIDKIYYFRGIEANAFGEEEEVIKLTIAPR

SEQ ID NO: 783 - protein, 620 aa, synthetic construct
MRTTPKIYNYARVSTTKQLQGVGLETQQQRSILESLSQEHNLPIHDENFVDQGLSAYHGKHREGVLGLVLSHIESGEISSGSILVVFSLDRLSRETVNVAMEQLLSIINRGVRVYTHIDGKMFDANSPNLSADLIVSVITMERANEESRTKSQRVKGAAKEGLKKWKATGEPQSSLGRVPFWIDQPTNTFNKNADGVLKAIELYLKGVGCLKIKQHLDEHYPYEAVRKKGRKTSQTDKWDFTAINQVFTKPSLIGEKHITVGGVKYKLEDYYPPLIDVATFQKLQQIKSLKAGRAPAKPTTHLLKGLVKCGVCGGRMVFIDKGRGNQAINYVCSNAAKGNHQRENYSVQMLELAIIRLSNDELLRSKIDENSYEAERAQLLKQKDDLEQELIELKSRYIQKKRKTILELIEDTEDRLESVISELEIIKPINIIQAFHELSDIKFDAEMMNDFNHPLRHELKLNLNKVIDHIQINRTQELSNITKSGYVSCISITVVFKNKQRRVLTSTPFQYFDNVQGKNIFVGYKYEYDVPFEELTRNKKLIVNLLSELHCYDLLHKLYPSKGRYEWTDMPIDFGTVHQKGTNLLGALKHMIEAGSWEYGIKKQFSEGIQYTIIEENSI

SEQ ID NO: 784 - protein, 524 aa, synthetic construct
MKTAYSYIRFSSKAQELGDSLRRQLDDTRRYCAEHNFKLSETSYQDLGISAFKDRDRASLEDMLAAIKSGSIQRGSVIILESVDRLSRAGIDKTQEIVKSILRHDVEIVSLHDGLHLTKGSLNDLIAVIRLAASADLAHQESVKKAERVKSAKKRQKDDARQGKAIKKRLVWWLSRESDTYKLNENAQHVREMIKLRQQGAGYHKIAMKLNESGIQTRYGKTWSDTAVREMLSHDALYGGYQVGTVRNGKFIKEELIHNYYPPLISYSEFKELQSEYVNRTGGHKKHNHLSGLVRCGHCGSAMQKKVSKRTTKKRTIEYKQWICVASVSGGCEFKNGIRDLDEHIFKVAKNLVIENSATISEAENTAIARVDELQSRLIMQKDKLANADGVAFDLILEATERTKAELDSASSHLAQLQANSRDITGEDVDRLAEYSNDAVKFNLHLKKLIQRIVVSKKGSNLWHVKLFQRNQHTVNLTVFRETQRSAFKYFLGGSEDRANLIEDAKNSFAEMHEWEKDYGDEVT

SEQ ID NO: 785 - protein, 548 aa, synthetic construct
MSTQTDDTGHLIDLVCRKSQAVKSKTGRREISVSAQEARGRKTAELLGLTVRHVWREVGSASRFRRSKKVPKQDLALQALDRGEIGALWVFRLDRWTRRGAGAILSIVEPADGRPRRLLVDNGDADNPGIGLDSSNPRDRSELIRRAEDAREETEVLSERVRNTKTFQLENGEWLSGVAPYGLRVVMVSAFDEDGEEIEERKLQRDPETSAGIPGEPHVTKMEIARLVTYEWPVARVTKREMARRLNDRAVPSPSGGNWAFSTVANMIGNPAYAGWQITGRSDNRSRRMLYLNEDGEKVSVMVGPALLAEEEYNEAQAASRGSGPPADAESWKPKHLLTDLLECSGCNSSMPSAGTSYACWRSRAGGVCPAPANAAAHSAEEYVFQFWSSRLHASDPEDPLLAIVAARWAARKDPQASEEEQTARAALADAERVLSRLWQDRRAGLFDGPSERFFAPQLSEANAAVTAAQKALDGISGTGPVDISFLLELEDQREAWEAADLPLKRDLLRLAIRRIRVHRAPKRGVQFDGDSRMEINWLDEPAWETAA

SEQ ID NO: 786 - protein, 559 aa, synthetic construct
MLCYSYVRFSTPEQARGDSHRRQMEFAKNYCRLNNLTLVEDLSFKDFGVSAYRGDNLKTGALGKFLELVNSGHIPTGSTLIIESFDRLSRQTAIKAQAIFSDIISAGITIVTAMDNRSYNLQSVTDNPFDLMYSLMIMIRANEESETKSKRVKEAIKSNIKNKKIVASKLPYWIKHNKEKNLLELIPERAEIIQHIIEKYLAGLGINKLTRYLNDNIKPFAGKNWYPMYLQKLLRSTSLYGERQYNIDGTLHVMDNYYPAITTKNTFAIIQENLNARAYTRGGKIPSAITGIGIAHCGYCHAVLVSQSTKRKGKIVDGLRRARCNSSSKGTKCITTTFRISIVENAIAEYCSQHIDLSFLEPVSDNSRTQLAKYKLELSELNKKIKNYVDFISNGNISAAIANELSASENEKKTIENKIKELDLNLLSNNREEIIKKWKEIKLSLNSYNEENILKLRELIRASIKYIYVFQHGVWPEKELKVTPSGKEYYVHNDVFHIQITFKNGIRKMIELGDNIDDTEVNTNNRTITKNGILYTSDEYTKMLEDKIRMNISKNKNDN

SEQ ID NO: 787 - protein, 442 aa, synthetic construct
MRKISNNIGLDDCSKKLRIAVYCRVSSREQALYGYGIDAQKSKIDAYLSLFDVEVEEVNYYIDEGISAKNLNRPEVKRLIKDVKEDKVDAIYIYKLDRLSRSVIDIYNMIEMLIDHKCNLVAVMDNIDINSANGRLFVGILAIIAQWERETIIERTNDGLEEMVRQGKWPYASKPFGYNKNEDLILSVNEKEKKILYDIVVQMKSGMTIKEIERYLLKEYDITMSSLQIRKMLKREWYYGLFHYKGKTYTNICPKIYNEEDAEEIQKMISKRHRADNYDSRYYFRNKIKCVCGEILDLSSTKKGNKQYFYYVCPKCKMRINQDYIIEQSLYAISSEVSLKEIKNNTNKALRKYHSINRKIQDIHNKYINNKMDLNVYLTSLYRLEFDKKEQMAKIKTDKLIDFIRWEQMTDLERGSFVNNHIARIIVDVHAKIVVKVEYIHK

SEQ ID NO: 788 - protein, 544 aa, synthetic construct
MSLPTTVETIIGYIRRSRQDLLREKKTNQDTLAEQHELISGILKRYEKEHGVHTELLSEIESGDSIEGRKEFKKLLEFLKKVSPRTVAVCVKELSRLGRGSMEEMGIITNILKRKHVYIITPYRVYDPQNKDDARMIDFYLFMARMEFLSIKERMVESRYTYAAMGRHMGGSSAIPYGYKLNERTQKLEPDERTAWVVQKIFHHYVVDKVGYNGISTILKKEGIPSPGGRGYWHPQTIRRILINRAYIGTLEFKKTYRQPEKNAEGKTIMKVYERAEHEQIIVPNAWEPIIDEDTFNKAQEILTGRRNSPTTRLDFEPNPLASLVICSTCNKKMIRQSGTQKYPKKDGTFSVYQKEFLMCKDCHIYVKYKSVEEEIIRILQEECIEVDPDILKERLKDLTDFSSIKKQDYDPAKQIEKLRAEIERHKDGLGNAGYKNTMGMMNDQVYELTVARLMREIEQKELYIEQLLAELQEEHTEGLDMDEVQFRFKTVLEYYLNGDFSKGEKNELLRGVFDYIVLEFISKGKFNLHVMFNPKMFFNATLH

SEQ ID NO: 789 - protein, 480 aa, synthetic construct
MTNAALTSANDLSAPIRRAIIYTRVSSDKAGGRSVREQEAECRTECERRGWPVAEVLTDNDRSASRYATKDRPEYARLRTLLQPGDVLVMWEASRATRDLERYVELRELLTERRALWCYSGKVYDLTDGGDRFSTGLDILVSEKAAEETRDRIMRAHRANLVNGKPHGRLSYGYRTRLEQDDQGRIIARHREPDPARAPLVAEAARRVLAGETTLSVLRWLVTVDPDTAKWNTTRLHKMLASPTNAGWRVAADGELIKGTWEPIIDEETRLALVAMFAARKTGPRGNQPKHLLSGIAVCAICGEALWRTKGGKAHGGNHYVYGCKKGKHVARSVIDLDAAVLEVVNALLADPVMLAEWTRPPEADPTVAVRLAKLIEQRDGVEAQLAEMKMPAASGARVLAKLEEQIAAAEKAVVPVAVDPAVAEIADSDDPIATWEALPLLGKRTFIRAVMSVTVDRIGPGRWHDRRRGIDIEPRRAAA

SEQ ID NO: 790 - protein, 519 aa, synthetic construct
MIKEDRAYVRVSTKYETQKDSPEHQESFIKECAAREQITIRHVYLDRDTATNIVEREDVKKMISDAQKGYIRSLWFASLSRFSRDALDAITLKRILVNALKIRVVSIEDGYDSAKKDDELLFGIKSVVNQNTSGDISISSRRGIRQSALDKGNIIASKPAFGYRKVTVDKRRTYEIVPEQAAIVELIYELYIDEGFGAKAIVKYLNGDNPQKTVYDSYSGKLWSLSTVQAILENPTYTGYNVAGRYKSEIAYDDITDLMNRRKKLVKNPPSEWEWSKEMTHPAIIPKERYDRATEIRLSRGGRGGRREFVNVFAKMIFCAHCESAMVSMSSIGRGGKRYRYLMCSRRRRLGEAGCPNEKWIPYEEARDELISEILSRISKAIEKFESSGTEELAISIPVNDFEKEKRKLEKRIEGNRKLLFEIRRQHMLDEIDKVQYEFEKEQYEKEIADFEQRLVRILAEEKKVVDLERLIKAAKKTLRELTDITSYNDDVERTRTLLNQVVKRIYVNGEDITVETYI

SEQ ID NO: 791 - protein, 469 aa, synthetic construct
MIKKIAVLYMRMSTDMQEHSIESQERVLMEYAKRNGYIVIRKYIDRGISGQHASKRPDFMKMIDDSETGEFQYVLIYDSSRFARNLVESLTYKSILKENCVRLISMTEPNLEDDEMSLYIDAMQGAANEIYVRKLSKSTKRGHNERALRGDLPGNAHFGVKLLPDKSIVLDEVKAPIMRWMYEAIYHDDATYYSISETLAAKGIKSQRGNIIDSRQVKRMLMNIKNKAYHWAERDGKPVLIKGNYPAVIEEELFDAVQEIIAERAKHYKKHEKPAEFRKHWLSGLLVCPYCGGGYSYNTRKPPQHDAFRCGNQTRGACKKGSQILVDAAVEMVLDKMSEVYTGPLAPYVKNITVSQPEPQIDYDKEIRLLEAQLKRAKQAYLAEIDTIEEYAQNKRRISSNIKELQEAKCQAQEGATLNEPQFKVKLLNVITLLKSDCPMSEKIPAARSIIEKILVDPRNKTMDIYFFA

SEQ ID NO: 792 - protein, 506 aa, synthetic construct
MQAATAYAHQHGLHLREDLTFRDLGVSAYDSSNLEKGALSLFLQAVKSGQVKRGSVLLVENLDRLTRASTYRAVALLAELIEAGIKVVTLSDGMEYTEKSLQDDKDLFYSVMLFARGHDESKRKSELISKVYEGKRRRNSKIICSVAPGWLDKDKDNECWVLNKEKSESVVKVFNQYLSGLSAHKICQNANEENWPLPSMRKDKNTGWHVSLVRRILKNPAVIGNYIERNKTEHKEFFPRVISDEDFAQAQLASDKRRSFPKRRDQEKYNIFQGIIFCGYCSAVMGYRNHGAKNESHKCEHRRYFCSNHVRGFTDTCKGRPGAKETQSVLIQEIFSRISIRISSDEKIAELQLNMEAAQDLREELKKRENNILDMIEFSPDAREQLAKRLSSIKYDIGEAEKKFLTAQADLIEAKDGGDELLNVYDSVSEALLAFEAGPEEREKLRLKMTRYVKKVYLYFKEGLAYVYFSDSKNPMLLMASNDANIIRFNDNGDPYPYKPPLPKIA

SEQ ID NO: 793 - protein, 548 aa, synthetic construct
MSLRFAFYGRVSTEDAQDPEASRSWQKRRAIDLIAPHGGVLAADYFDVGQSRSLPWKRRPEASRLLGDVACRDRNFDAVVIGEPARAFYGPQFALTFPILTHYGVGLWVPEVGGAVDPGSEAHDLVMTLFGGMSKGERARIQMRVRTAMSALAQDTSRYLGGRPPYGYRLVDAGPHPNPAKANLGQRLHRLEPDPATSPVIERIYRMYADGAGLRYIAQQLTDDGVPSPSQYDPARNRHRDPRGWSHSAIRAILDNPAYRGIRVWGKQEKYEVLVSPDDVAAGYETRMRWRDQADWIAPDRRTHEALIPDELVQAVRLRTQARRGPGLVCSRESTVPYALRGLLFCAACGRRMQGAARVGKRTTRILYRCELGKSRSVPVDLSDHPRTVYLREDEVTARLDEWIATLADPEDLARGQDVDPAGGTGYAALQRQLREANAKVAALVTAVESGVAVEDLTAALRRRTAERDELKARLEQAERPRLMSAAQISELVEELGGLSAVLGAATGAERAEVYATLGLRLDYDPHLRQVKATADLSRVAGCVRGGT

SEQ ID NO: 794 - protein, 543 aa, synthetic construct
MSKTIISYSRVSSAKQVAGTGLSQQKDKEMLDTLSIELGIPIDSREFSDAGKSGYHSKNLEGDFGKLLNLIDDGSIVKGSVIAITSLDRISRAKTNKAMELMLSVINRGIRIYTAMDGKLYSDDSPNLTADLIVSVIIMSQAHEESHKKSVRIKGANTKMIEAFLDGERGKDGYPKAISGGRLPWWVASIDSQIREDKIYFPIVKDAIKKMFDGYGTNRLTEYLNDTYAAPQGRGKWSRSTVAKIHTYTALTGVLNITSDGKEYSLQDYYPRVLSDGEYQRLLKMKNGKQYSRTASEIVPLLTGNKVAKCGVCGSSLASATSATGYRSYRCMSKQNRGKSYCSSSAVPAALIDRVVFGLIEDVSFTEKESKEIEGNPIQTLKDELEALENRLGELLEAYEEGTLPKTLFPKMNRVELDIETKKQELKQAQIALPQDIDELELVRRWSNATAECIDNPKATDDRLALKELITDSVNSVTVRRSNRSKVYNVVVELVTGEQRYAIIEGDTVIEQSFTLPELHHVRKRALGNMLDRYITENSDKDL

SEQ ID NO: 795 - protein, 450 aa, synthetic construct
MQVAAYIRVSTDKQADKGYSLPEQEERIRAYCKSKGWELSKIYSDAGFTGSNMDRPALQELMREISAYDIVLVNKLDRLSRSQKDTLHLIQDIFAPAGASFVSMQESFDTTTPIGIAMVGILSAFAQLERSQIKERMKMGKEGRKKKGLWHGGVNIPTGYDYKDGILLPNDEAEQVRIIYEMFLEGISIRDITRYLQSHFTTRYTSWNYVGTVRRILSNPVYIGMVGDYKGQHEPLIDLETFDRVQVLLDERKQGGKVSTGKHLMTGFIYCGYCGSRVRSCCSVTKAKRYGYYRCGRADTGQLSKLDHKCELKPKNENEIDEIIKNEILKVKFEDVEISDSAATVLPDNSEEIKKIDQQINRLIDLYAICGDNVEELAKKLKDLKAKKTALEKISAKPKRATKKHIMESLRIAQDTFDSGSIEDKRMIIDSLISRVDLYNDTVKITWKFS

SEQ ID NO: 796 - protein, 543 aa, synthetic construct
MKDKITALYCRLSNDDDLQGESNSITNQKAMLLDFAKKNGFHNTEFYVDDGWSGTNFDRPDFQRMVRDMENGKIGTVITKDLSRLGRDYLITGQYIEMIFPDHNVRYIAINDNVDTQKSENDMMVFRNVFNDFYARDTSKKIKAVFKAKGMSGKPLSPIAPYGYKKSEHDKDQWVIDEETAPVVRKIFRLCIDGYGPMKIANILTDEKILRPTAYNELRSTGQITCEKPYRWNCKSVVGILERQEYLGKIVNFKTRQKSYKCHKTLTNPVEDRMIFENTHEPIISQQDFDLVQEIRNNRRRKQKTNEINPFSGMVYCADCGKLMYICRHSKEGKSTEHFKCGSYSYDSKVCSAHYIRTVVLEQVVLAEMNSILDTVTKNEEEFVKTTIDSRNSEYMSEVKSAKKLLTKSEKRITELDRLFTRLYEDNVLGKISDSRFEVMSKNYENEQEQLKVKVAELTKFIEDKEQKCSDIHDFIELVKKIKHIDELTPNNLREMIERIIVHEPDKSSGHRQQEIEIIFRFNVVKSRIVLDGRDFDRRKKAA

SEQ ID NO: 797 - protein, 547 aa, synthetic construct
MRTAYSYVRLSSKKQIQGYGQERQWQAIQAAALAHCWELSEKTFSDLGVSGWKGANIETGALSQFLQCVEDGYIEKGSVLIVENVDRLSRAGVQRAVSLLMQLLASGISIYTFTDSKLYEPDSHNPLMDLMAWALSAQRAFEESERKSQMILNAKAKAREKARLTGEIITRRCPSWLRVNQDKTAFELIPERVETVRKIFDLYVNGYGTPRIGRLLTEEGRKPLTGRAWYPRSISRILQYRAVLGEYQPTLNGKPEGDAIKNYYPAIIDEDRFNEVQAVLKEGGAGKGRRGKEMRNYFAGLLRCSCGEGMHIVSSCVKGKRYYQLRCLQYRISCFGSSWNFYKLSSFVLFALRRLPILEVMGSQDNNNIKELNAKERELTFLLEDTRRQLDNTINAIAALGLNDQLQSKFRELKTSVTNIEKQLSNVKTELETSQGKLVIQKQDSEMLTGRFLELIDSTKDIDGRIKLNQVLRRYLSKIEMHADKKEEYRYIKIYRKDGDELVSIQCDHSLKGALFESKDGLETFELLPATDAKRNEISNTLLCTPK

SEQ ID NO: 798 - protein, 464 aa, synthetic construct
MKRAALYIRVSTMEQAKEGYSIPAQTDKLKAFAKAKDMAVTKIYTDPGFSGAKMERPALQEMISDIQNKKIDVVLVYKLDRLSRSQKNTLYLIEDVFLKNNVDFISMQESFDTSTPFGRATIGMLSVFAQLERDTITERMHMGRTERAKQGYYHGSGIVPLGYDYVDGELIINDYEAQIIQEIYDLYVNQGKGQQYITKRMVAKYPDKVKTLTIVKYALTNPLYIGKISWDGKVYDGHHTPIIDKSMYDKAQEIIARMAQKGGEQHGNQLGLLLGITYCGKCGAKVFRYVSGGKKYRYNYYMCRSVKKMLPSLVKDWNCKQPSLRQEVVEKKVIDSLKSLDFKKIERELKQVENKTKSKITTINNQISKKHNEKQKILDLYQYGTFDVTMLNERMKKIDNEINALTANIANLEGTKSESLINKLETLKTFNWETETTENKILIIKEFVERIELFDDEVIIKYKF

SEQ ID NO: 799 - protein, 531 aa, synthetic construct
MASHSSWEIHPDLAAALASGKTVEEWLDGRTPVVSYARISVDLQKVKAIGVARQHGMHCDPAAKEQGSAVVYRYTDNDLTAADPDVQRPAFLQMVRDLRARQTAEGIAIRGILAVEEERVVRLPEDYLKLYRALTVEEDAVLYYTDKRQLVDVYAEVEQTRGLMSSSMGETEVRKVKRRAKRSTKDRAAEGKYTGGARRFGWLGADKDLGRTQNEKLDPNESVWLRNMIDMKLCGKGWHTIAVWLISESIATVRGGEWTSTGVKSLLTNPAICGYRILNGELVLDPGTGEPKVGNWETIATPEEWHQICEMAWPGGKLAKTKKPKGKKRARKHLSTGILRCGWIPKSDPKEDMCLHSMVGRPPHGNHKWGNYVCNGTDCRKVSRRMDKIDRIVEGIVVRTLKDQFATLAPEEKTWHGQYTLERLTARRQELKAAYKAEHISMADYLEFIDPLDAQIKESQADRDAFYAEQAAKNFLAGFTEERWHDFDLEQKQTAIGTVLQAVIVHPLPEGRSRKAPFDPSLIEIVFKNPH

SEQ ID NO: 800 - protein, 556 aa, synthetic construct
MKAALYVRVSTTYQIDKDSLPVQRQDLINYAKYAFNIDDYKIFEDAGFSGKNTNRPAFQNMMDRIRSREFSHLFVWKIDRVSRNLLDFCDMYEELKKYNCTFVSKNEQFDTSSAMGEAMLKIILVFAELERKLTSERVTSIMLARAEKGLWNGANVPLGYSYDEETKYPVINENEAKTIRFIFDMYEKRQSTAAISKYLNENNVHTKRGGSWTSKGIGDIIHNPFYYGTLRYNYRESARGKKKSEDEWIVKENNHEGIISKEQWLRCNKIIEENAKKNASRFRSMNQIQHIFGGLIYCKTCGAKYICSLDKPRKDGYKPSRYICGGKIKGVICDNKIVTDVTIGDFMLQYVLNFISCINKIPSNLEDLENRLLGNYDVCLDYDSLYDTFSMLAYIKQMRKNNYKYEDLDKIVDFEKVKSNKSEIDSLLENKSKLERAAERLTNLYLYDDVPMSEREFYKRKTEIEDKLSEVNEKLNALNNEKNKPKITDLGFMDEMDDLLLRLDFTGSSLRELTMNNDRKILKDFFETIIEKIIVCDKRVDSIVFRNGLVHKFYYK

SEQ ID NO: 801 - protein, 522 aa, synthetic construct
MTTAFSYIRFSSSTQSHGDSLRRQTQLAKNYCNKHSLTLSEQSFQDLGVSAFRSANTNEDNGLGQFLKALEIGAIPRGSYLLVESLDRLSRAKVQTALRQLLNITEYGITVVTLIDKLAYNSDSDAKDLIISLTVMERAHNESKTKSERLKAVWANKRANPHTTNKSSLAPFWLSLNSDKRTYSVIEKQAEIVKRIYQLSIDGHGVIAIARILNDEGIPAPKGGSWANTSVGRILKTKAVLGHYMPHISRNSTNALIEDYYPAIISEQVYYLSQHRKSERSNPNSAGRKTTFPNVFNQVAKCSKCGSPMYYDNKSPTLKYLTCREFKKKTCTNKPIRIELMHQFIIEQFLHPQHFEQFNKLVSANDIGNTDIVVLEGNLESAKEAYKQLLSISSDFSDPVIQDEIKTRHETIQSLEKQLEEAKSVSVGKISSTRLNFWEACQLTANALNKEVYKKTPEELSPEESYSAREKLNRALKDTFGEVIITHCPDTKKASITANGFTFEAHKSAMKTGFYDVIWWAA

SEQ ID NO: 802 - protein, 525 aa, synthetic construct
MLDPNGIYFAYLRKSREDREAELHGYGETLKRHQRMLEDLAKYHKIKIAKFYSEVVSGETIASRPQMLAMLDDIESLSPDGVLVVEIERLARGDTRDQGLVLETFKYSGTRIITPMKIYDPTDERDEEYAEFGLFMSRREYKTINRRLRDGKIASFNEGKWTGNKAPFGYERVKLAGEKGFTLKIVPEDADVVRLIFQLFIYGSNASNNIPVGTSKICRILDNLHISPPIGETWQPCTIRQILSNPTYIGKVHMGRRSTQKKTLNGVVKISRPINKNAKIADGLHPAIIDDALFLKAQEKRKANYQKPFFEGIKNPLAGLIYCSVCGKSMYRRPAGKRCKEDMIQCTTHGCPTSASYYHYIEEKLLVSLNKWLEDYRIQVKDISPENYAQQLNLLQSQLNAAQNESETSKKQLSKAMDLLEKDIYSVEMFQQRASELNEKIALSSRSISDLSVKIDSIRTKAVQKEEVIARWERILSLYPQVDDPAVKNALMKELLTRIEYSKPHKGNRQNGGMDQFTLKLFPRL

SEQ ID NO: 803 - protein, 515 aa, synthetic construct
MKVAIYCRLSHEDDDKLHENDESESIQNQKSMLINYAMEQNWDIYNIYCDEDYSGIDSLRPEFNKLLSDAQNHKFDIVLCKTQSRFTRDMEIVEKYLHNKFVEWNIRFISLVDHVDTLDKGNKKSRQINGLVNEWYLEDLSENIRKTFDNKRKQGLHIGSFVCYGYTRNPQNKNKIIIDHNVSGIIQLIFNLYEQGTGITKIAQVLNTRNILPPTKYKQSQGLNFKNQNKNIEYWCESTIRKILKDEVYIGNLVQGYNKKISYKSKKIVAQPQSQWIIVENTHPPIISKEQFYKVQEILKSKTRKCKNGEMHLFTNKLICASCGSKLYKCTNDRGYVYFSCKNSKKLYKTCTPHSIGYNNLKSLITDKIREKILEFYDFNSINDNMFLSDNTSQLLENKILSISNEINNITNAIKELYLNKSANKIPESIFQVLNSDFISDKIAKEQELQNLKSNLSNLSESKIDVQSLKENTINELKNFSKLNREIINSFINYIEIDEKNKKTNSQDIIIHWNF

SEQ ID NO: 804 - protein, 522 aa, synthetic construct
MELLNVCIYLRKSRADREAEARGEGETLARHERILLDLAKKRGYNVGAIYKEIVSGETISARPVMQQLLREVESGMWDGVLVVEVERLARGDTIDQGVVARSFQYSNTLIITPLKTYDPNNEYDEEYFEFGLFMSRREYKTIRRRLTAGRESSAKEGKYCGSKPPYGYSRVKLVGEKGWTLQPVPDQAEIVKLIFNLYVHGVSGERIGMAKICRKLNDSGIKTMDGGLWTISRVQAILRNPVYEGMIRWNSRKAVKHIKDGQITISRPFAQDYILVKGRHPAIVSRELFQQAQDIVNKNPARPLNSLHVLRNPLAGIVRCGKCDHVMTRKSPNGRQGDLIRCPYSSCSNISSKLPLVEKALLDGIQELVDGYRLNNSVSDQEYSLSISEREKMIQGKLKEIDILKKRKQRQYDLLEQGIYSTEEFLERSRATAAELSACDAVILSLKQEIEHEQELQFQRSSFIPKCEDLLANYWTWDTSTKNRFLRELIEKAVYTKNAKNTWKNGDDISFTLDIYPKIQQK

SEQ ID NO: 805 - protein, 549 aa, synthetic construct
MAESRCFKKVFVYMRFSSDAQSDGNSFARQRSLAQAYLDKNMPADIEVEWIEDPATSAFNGENLESGALGKLLNRVREKTVTDGLLIFEAVDRASRQGGMSLMAMLNELLDAGLSLCFLDLYDQRPFDKHEKPDMLGTYLSLKADLARLESMRKSRFSKDNWRRKRDLARKSKVPFTAECPMWLSVEGDVYKPQMELVDSIRKVFELAQMGWGISRIVRYANGETWPAPAKGTKWHLSLVRRLFENRALIGEFQPYRGRRKNRQVDGDPIQDFYPVVVEPSTFYAVSAIRKKASPFPNRRDVNNYNYLLGLGKCECGGTWRRLNKNSGKQLGYAQYSCSNRQLGVTRCANLPARKFDMQFIGIACEKIPELLKVVDGTLEAKKTVIQGKLENVGARISRWLDLYDAAGTNIADILPRLEAAQTERDQLVSQLDELEKSAPPPGDFDFGDAISAYLPAFLNVYHDELAEESKLAFDARALFRTRILASVESVQVAQSRKNMVVRLRNGISFTEPLEDDEDGFTDTSDFSDGELHDQKAQTLRAMNKLLPR

SEQ ID NO: 806 - protein, 469 aa, synthetic construct
MPKNPQKTAVIYARISKDEQGTFSGVERQRQDCLDLAQQRGLQVTQIYIDNDISAYSGAVRPQYRRMLEELQTRKPDYVIAWHTDRLHRHPKELEEYIELTDKADASTLTVKAGELDLSTPSGKAVARTLGAWARFESEHKSDRIKRKKLQLAKDGRYVGGPVPYGYSKLPDKTLVLHPEESKDVAKAFKRFLNGASIDSIVRDFNSRGLKTRRGLEWNHTAMRNMLKRATYAGKSTHQGQVIGDGLQPAIVSEADWLAACQILQDPSRRRNAESKVRRLLAGIVQCAECGTPMKGSTRSSKAAVKNKDYYKCPSRGYGHSFQTADPIDTMITELVLERLSDNDVRRKLSAPDNPERVAELQTELVTLRSRLEQASESFAEGLIEKSQLATITATLRGKIQGAQNELATLSSGSAVPPVDDGEIRGWWEKASIEARRAVIKSMMAITLSPVKVSAPRRFDPRRVVIDWK

SEQ ID NO: 807 - protein, 528 aa, synthetic construct
MDKTASDLMICYYRLSSEDVDVARGNAAESFSIAAQRLCVQNFLASRPDLEGTVEEIVDDGYSGTNMNRPGMQRLLSLVKSGSVKTVIVRDLSRFSRNFLEGGHYLELVFPAYGVRFISINDHFDSADYGESTGGLELGITNLLNQLYSRDLSRKIKSVTDRKKLNGEYAFGAVPYGYQKGEQKNTIVVDPPAADVVRQIFQWASQGISITQIARRLNASGTETPSSYLAKVRGRYKVRKFWTYESVRNILQNRIYTGDTEAFKSHVVKVGSNRTKLLTEAERPIIPHTHEPIVSRELYFLARSTVQKTAPKTPTGSPPSLLQPYLVCGCCGNHLVKGKASNKNWRCASARYVPESGCAEVCISDADLQAILIRAINMQCQLRDARLETFRRQFESHASKRRAINARMQRVQAEIHRKQEELMSLYEAHVGGQLSKEAFAEKRESLLRAQNEKKRQLAQLESDWELLCAEEKNAKKAERQISVLSPYHEMSALDPALMRELVCEVLVFDRQKIQINWKFPDFASKLVE

SEQ ID NO: 808 - protein, 487 aa, synthetic construct
MKKIAAAYIRVSTHMQEELSPDAQLRCIRVWGDAHGYYVPDEYVFIDNGISGRKAKKRHDFLRMIGLAKTKPASPFEAILLWKFNRFARNQEESIVYKSMLRKKCNVDVISTTQQTTKDIYGDLIERIIEWTDEFYSIQLGEDVFRGMTENALRGNFQASPAFGYKVEKGLGLVIVEDQANIVRMIFNLYANTRMGFYEIARHLNRLGYKTKKGGAFEARAIRYIIQNPIYKGYLRWNYANGTTRVVNDESEWIIVKSPLVPIIVSEELWDRANERLKNEYRPKNGKPVSKHRHWLSGLVKCSSCGASLSTSVQYRHDRTYINFQCYKYLKGKCLVSHGISEKKLVPLVLNVLKEDMSKSYIECERIEKVVENQQDILDVQLKRLATREARIKEAYLNGIDSLAEYKANKEEIQKEREFLLQQSQDHNKTEKESNELPNKIRGVYDILVSDQCSKDEKQAAIRSIVKKIVFDKENKTLDFHYYIKED

SEQ ID NO: 809 - protein, 523 aa, synthetic construct
MKRAAIYARYSSSLQKATSIEDQIAMARRECERNGWTVVKVFEDREKTGRNTRRPGFQAMTAAVARGEVDVVVIEALDRLTRKLADALGCYDALQFKGVDLHSVKEGAQDFFKVMMAGFGAQQFSEMIGAHTRRGMQGAVSRKRLHTSAYGYRKREAVEGLNREIDPEEAEIVLRIFRETADGRAAAAIAKGLNVDRIPAPKGGTWEASSIRGRKDRQEGILNNRLYIGEASVCKFGRRYHPETGAKAVFATDKDAVKAIFEELRIIPQDLWDLVQAELAMRTQRATRTGNPQAARRSKHLLSGLMVCGCCGAPYTKSGRDRFRCRENQKRACENRVSVRQDRIEARVFDALRSTLRSADLIAEFEAAFQAELRALEGTDLGASLKSANAQLAKVRNKRRNIMNAIENGADFAEYSARDKDLKAEASELEDRIAQLEAQQDRKDATPPDIPAIFEAALQDLEALLGDPDLVARANEELKTLIRSITLIPDPKSEDGMAAEILLDLGSLRSRVWDRTAARGQSP

SEQ ID NO: 810 - protein, 522 aa, synthetic construct
MVKQYHVAIFNRKSRNEGDTDETLRNHRQITIRLCEEKGYTYDNYEEIISGASKFEERKELIRLLENVDKGMYDAVVTVEVSRLARSGQYSQIIADTLAENNVLIITPKETIDLTIDSQRLLYDIQAAVNSNEYRVIRNRMRTGMIEKAKRGEYVSAKAPFGYDAVIKNKIRTLQPNENASTVKFCYDLAEKGYGMKQIVKELNLRGLKSSSGGKFAFKSVQNILKNKQYTGTNIFKLSDKKGNITNVIEVPDAFTKIVSLEQWLKVQDAIKERTSGDNEVRNRARGEVRTILKDLLYCSNCGAKIGFQFNPARNLMVKKCRCGMRGITEQALLEYFWDELISVEKHFRKEWEKALEISSEGTAKEITLQIDALNSSKSKLNKKLKRARDEYLDGVFTKEEYLSDKADIEKEIQEVESNIVELEKRLLAVDTEGLRKKLQDRVHWIEEVKRITKKRQGKLTMPIGEEMPAVQPEDFPEVNRLLKLVIDKIYYRRDDEHTWVDEEGNVEVTKEIYVHLNITTK

SEQ ID NO: 811 - protein, 558 aa, synthetic construct
MNTTNFSSLTIKEIKTQTLEELPDKITVLYCRLSAEDANEGESNSISSQKQILAQVAEREGLVNPYFFVDDGFSGSNAQRPDFQKALNLVETGKVSNFVVKDLSRLSRDYLLSGQLTEITFPSKNIRFISLNENLDSSKRNSQDAYLTPLVSLFNNWYSLQCSEKIKLSKHTKAKTGEKIGWTAPYGYLKNPENSKEWLIDDYASQIVKRIFKEYLSGKPIASIANGLRKDKILTPANYKKKLGVSNYRVLESDPYHWKSQMICQMLEKEEYTGATINLKTAKISYKQRNCRLRPREDWLIFPDTHEAIISKEDFALARKMLGHKRVVQRNTWKDKPGHENIFAGLVFCENGHKLSFCPQQKDHINLDHYKCYHHRRAGDSCSGLHYLRKNVLEELVLTELQQLISSTHLDEEKLLEELKSRFDIREDKRQDSLRKQLNLSKRRSKELDTIIQKLYEKQLLDEISEDRFRKLADGYESEQAELEQQIRELQEVLVGQTESAENIDRFMRIIRQYTNIETLSTQLVNELIDKIVVRQPTGRGKSRQVPIELHYRFIGEI

SEQ ID NO: 812 - protein, 427 aa, synthetic construct
MLPLLSRIVNAGVDLVTLDDGITYDRASVNSNHLFLLVAKVQQAHQYSDSLSRRLRAAYQTKRAKAAAGEGATRRMPLWIRDGKLRDDIAPFVTQVFEDYAAGIGERRILGRLKGQHPEFETISPSTFRRWLRNPVAVGRWNDIEDVWPAVVSKELWFRVQKRLTDGVKPKAASSKYLLSGLVKCARCGKNYCVGGQKGALTMLCVSRHRFGSNAGGCTNKRSIPYAVFDFIRSQTAHAALVRASQSQNLTASEKRQIEIDGELIELRKQSSHAAEGLVRYGMVKEITDVLDRVTDQIDRLEKERVMLQAVPAPATLDDMIDVENDLLDDDIVKLNALLQGVGYEMVVDDRTIVVCEASVFSTLQSQTYRYLGADRVTGTYKVTANDEVLHHLPNLDSKVQQDEYAKFLKQEARYESGELKREIYRL

SEQ ID NO: 813 - protein, 550 aa, synthetic construct
MKPRAYSYIRMSTDIQLRGDSLRRQTEASKKYAAENDLELIADFKLEDIGVSAFEGKNVAQGSLGKFLALVEEGQVPKGSYLIVESLDRISRQNPQAATSLFLQILQAGIHIVTLTDNHVYRADGGNFSDIIVSVVIMSRAHEESRTKSLRVGAAWENKRQNIHEKKLTRVAPIWLKLSEDRANFEMISERVAVLRAIFEEADHGKGSLQIARRLNREGVPTFAPSKGWYESYVSKVLTNRAVLGEFQPHRYVGGKRVPYGEPIADYFPVIVSREQFERIQAGRAVRRLRGSGRKGRNNINLFQGVARCGYCNGRMMIVNKGDGPKGGVYIRCDNARRAAGCTASNWPLEHFEAAFLWFVEELDVGAIAEGAEAEEARKALDGQIAIVSVDLEKQKVMRERAFELLGDSSTAAAFVKSKIDEASLNIDRLEKRLAELLGSAMTDQVRKSRPLEEVKEVIRNIGHWKLAHENARTRVSDWIKRNVKELLVYSDGLEPTGVPQARQFSALFVTGVFRTVQMTGVDPTVAAYSIHASGDRWVLMENGKQSVYS

SEQ ID NO: 814 - protein, 524 aa, synthetic construct
MSVFDSNNDYIVYNVGIYLRLSKEDENTGQSESIENQRKIVENFISNYNWNIVEIYIDDGFSGLNFNRPAFKRMLEDIENKKINLVITKDLSRLGRDYIYTGYYLERYFPTKNIRYIAISDGIDTYGDNGNNDISPFKSVINDMYAKDISKKIRAVMDTKRLNGEFIGAFAPYGYLKDPNNRNTFIIDDKASKVVKRIFDMYIEGNSMGRIVKILNDENIPCPSKYKSTHCSYKNAMVKRYKWCQETVKRILSNPTYIGNMTQHRQEKISYKIDKFRKIPCSNWITVEGTHEPIISPEIFETVQNLIKRQTVKYSRGKESFHLLNGLVFCKECGRKMTYRRDSSGKMIMNCITYTKFGKSECTSHRIREELLTDYVINDLKRISKQYLDNGFFQSISELETCEDKSLKSELRTIEKRFEEIKNIVKSLYEDKIKGTISEEDFLCMTKEYSEEKSRLQNKMETINDRLNEKTREFSYIKLLKDIAEFNIVNKVILLQLIDRIEVDSNRKITVYYMFTNPQIDNTD

SEQ ID NO: 815 - protein, 531 aa, synthetic construct
MKPYYIYLRKSRTDREAELHGEGETLARHEKVLLEFARRNQMQVSKVFREIVSGETIAARPQMQALLLDVEQGLCEGVLVMEIERLARGDTKDQGIVAEAFKYGNVKIVTPMKTYDPANEFDEEYFEFGLFMSRREYKTINRRIQRGRIASVKEGKFISSIAPYGYDKVPIENDKGYTLMINPKEAEVIRMIFNWYTAGIMQPDGTCRRLSTAAICHKLDLLHLKPQIKDHWSPSSIRDILKNPVYTGSIRWAYRKEMRILKNGMIERHRTTSNDYIQCKGLHEAIISQEIFDTAQKRMQSNRKSPTKCSNLLKNPLAGIIICGKCNTPMTRLAPNKKTNYAFIKCPNRDCDNISAPLDLLEKQLLAALDYWLQNCVLNLNHRNNPAYGGNELHFLKNSIDELKKEQTALDKQLDLTYSYLEREIYTEVEFQKRKSFISSQINALRSDLSTLQFEYEQLLCIPHSSSPEAIRQTKYTFVDIYWLLESVTGKNQLLKAVLEKVEYLKTERNKRGEKSRANFQLTIYPKIPKV

SEQ ID NO: 816 - protein, 401 aa, synthetic construct
MKKQPDKGKITALYERLSHDDERAGESVSIENQKRILEDYALKNGFTNIRHFTDDGVRGTTFKRPGLDAMLEEIRAGNVATVIIKDQSRIGRDVVEVGLLKRTFDEYHVRFIAANDNLDTANGFDIMSIFRDVINEWYVADTSRKIKTVFKSRMEKGLRCSGSVSYGYLASKENKGEWVIDEEAAAVVRRIFHSVVAGESIASIARALRAEKIPIPSEHWKRIGAPVRAAKYTDPYAWSTTTISYILKRPEYTGRKVLGKTVCENYKTKSTRKTAPEEQYIFDGEIPAIVDEETWNTVQRLMGTKRHAPKRQTTPNRLTGLLYCADCGAKLTHRSSLVQGKYLDDAFVCSSYRQLTQLNTSTEGSYFTLETAALFCAYGQKGATSHDETERENPRGIDRRD

SEQ ID NO: 817 - protein, 545 aa, synthetic construct
MTRSLTIEYTEMNEGMRDITVLYARLSKDDGRKTGDSDSIVNQKLLLENFAKSEGLGNCVFFPDDGISGTTFNRPAFQAAIQLVEAGRVKHFIVKDLSRFGRDYLKVGAFTEVVFPEKNVRFVAINDNVDSYREEDNSLAPFRNLFNEWYARDTSKKIKAVKHAKGNAGEPISGTLPYGYLKGENYKQTKIWLVDEEAAKIVQRIFHEYIEGKSLSMIAGGLERDKILIPARHKEAIGEHSAKVGKLPYRWSFDVIGSILKNQAYLGYVVNFKTYKKSYKSKKCLPNPREKWKIFPGHHEAIIDKETFDLVQKMRNSRRTRQTHNKRIGLFSGMTFCADCGHKHHYDNHENYKNYFCSGRASRLRYCESYHRIREEDLAKAVADDFAKIQAKVNEESGDFVAELHRKFASDDLKKVAEMERKFHENETRILELDSIISRLYEDNVSGKISDERFAKMSEDFEKEQRNLEIQNIAFREKITKIKADCQNVDNFVKLAKSTALLENLTPEKVRELLERIEISEKTLSEDGEKTQKVRFFYRFVGALE

SEQ ID NO: 818 - protein, 630 aa, synthetic construct
MQPSIYVYRRVSTERQAKADKHGLDIQVRESTLIDLQKQFPNYPVVELANDAGLSAFKAEHIKVKTALKDFIDKCVNGEIVRGSILVVYSLDRLSRLKLGDAYQKVFIPIVENGVQIYSETEARFYSNHDVDYILATVLFSRAHNESKTKSQRNKDAILNGVKRWQQEKKFTPNLTTSPFWIDNKTGEFNHLADAALYMVESLINGVGYKTIADELERCYPTPPQRKTSKAPSFWTLETIFKTRNNRSLIGEKTIKVQKDLEISLEKPEKVKPKKNGEKVVKDKKEKAEDTYTLDGYYPSLISMDTWHKLQKTKANKRRTYSDNIYLLTDLRSLAVCGECGYSLAGTANKGGSDERAKYFCTGASSKRSVHTLWKADVETMDRVVLLLLNAGIEEGVKLITSPEYKSMIEDLKNTILSEQHTLSELKTRFERTQSHTMLDLMLTAEDKIKQAEKRLEELTASPTNATGDNITDYEIEFYRLYRETNFKDLTDITRKDIKLEIAKLLQRVEISPCGCGWRISLKMNTGVCVEYVTTQAITTDTINMGNKYIRQELAYNGLYHYMIRVKNSRTMENHRIIEKWLRKTAQLDNIPSKPNFINDIIHEIEPVNPLRDSTKYDLTYADLELMFKR

SEQ ID NO: 819 - protein, 526 aa, synthetic construct
MDEYCLYLRKSRIDLEAEANGQGDTLARHRAALLKLAQKRGFNITGCYEEVRSGESIAARPEMQRLLNDVEDGRWAGVLVMEVERLARGNTTDQGIVADTFKYSDTKIVTPNKIYDPGDEFDEEYFEFGLFMSRREYKTINRRLQRGRRASLSEGKYIAGKATYGYERYKLSGEKGYSLRIIPEQAEIVRQIYNWYVNGELLPDGTLRPLGSYTIAKRLDARGIPSPTGGKWPPCTVKDILTNPTYIGKLRWSYRPTVKRMVDGELVKTRPVDRSVHLSDGRHEPILDEVLWHRAQLMLKNRSHAPVPKSTNIRNPLAGLLICSKCGRSMERRKFKHGRDTVACPNKDCTCKSSVLEEVEAGMLDSLRIWLSDYKVKLAQSQETISHTGPTAEQEITSLQRTLGTLQAQMENLYNLVEQGVYSTDLFLQRSQALTARMAEVNQQIESTQAALTASRRIARNRFEIIPRIERVLALYPTLTDPREKNTILKEVLEKILYTKTTGSRWEASDMNLYVFPRVETDGEQL

SEQ ID NO: 820 - protein, 430 aa, synthetic construct
MSRAHDESFIKSQRVHQAWKKKQDKARADKTPLGAACPSWLTVQDGQYVPIPERVEVVRKIFNLSKEGYGQRLICNKLNDEGVPVFGTDKRNKSGKWGTSSINKILNNKAVIGEYQPTNLMEGVRKPVGEPVKDLFPKVVDEELWYSAHSERQQRAIHKTTKPAKIFNVWQGIIKCANCGNAYHLINKGEGSRGGRYLRCFGTTKRECKTPLIRWDVSELVFKELLTKVDSLPLVKDSTGAIQQQLTVVDGKLTEVNERLSEIKDQMLSLGGKMPAALVEVLVALEEQQTELKQQKNSLYQEMQREKIIDKDEFLNKVDLVSYEGRFKANRLLKHLGVNVSVHAMKDRFIFVVFSGGEKPLLLIHYDKKRGIHIGPMGTDMMKLCMDQGDFDAFERAKKDSPEEKWPALKRSLSKAYFEGMAEVEKILKE

SEQ ID NO: 821 - protein, 560 aa, synthetic construct
MNLESLKGLRGGLYARKSAYRGKTKSQGRSVREQLDAGQADADRFGVPIVKEFVDDDRSASIYRAREREEFESMIEWINKKRLDIVFAWASTRLQRDLAVYARLRDACAANGVLWCYGGKVYDLTNKDDRLQTGLHALLGENEVEEMRNNVLRTLRANAANGRPHGQEGYGYRRVYDPRTRALLKIEVEPAEAKIIGELCKRVAAGDAYSVIARDFNLRGVAPPARQWRKEHIGRLAVWRDDLPENVLIHPEWVQRIKDHAHLQAEVQQRLKEGEEELSVSQDFNERQEPLLLARWHAATIVDYASHPRYIGVRTHHGKATAEGVWPKIVKKSTHARCLAIIKERKRKPHNSRPGRAVNWLSGSMVCDVCSVAVGSGRNASGPYYRCMQPKVEGKYGGKGYHVSATTGPIDEFVEEKLFEWLSSPQFVEAYTKGDDELMKQAAEADAEVTLLRGRLQEFRESAIDGKTSAETLAVVEAGLLPKIEEAEKVAKSLKAPSLVRDLVAATPEEVATAWAEVPMAQRRLVAETLLDIRLRKAPRGGHMPVEDHVVVTPRLPAAA

SEQ ID NO: 822 - protein, 573 aa, synthetic construct
MTKAYSYLRISSKEQIRGGGIERQLESTRRYAAENGLVLDDELRDIGKSGYHSAHVKDGALGLFLELVKTGKIDRGSVLIVESLDRLSRADVITAQSQLLQLLSADIDVVTLMDNQRYTRESDFTQLIISLTIMSRAHEESRTKAERTKAARARSKQMAIDAGGGVYVHNAPYWIDQIKQNDGTYRFKLNDKANVVRQIFNYYDNGLGATAICRMLNQNGIKTFKRNAVWSEPVIFKILRNETAIGSLTIGSKVLPGYFPACVDEVVYWRVQDLHKQRSESSPRKGRKGERFTNLYQGFVCCHHCGGPIATKRKGVGSHLQYYQCNTQFLNGDCRRDTKRKLMRLELIEKAILDNVLVYHLDNALSTNTGNVEKERSALVDDVTKFEKQISNSLVMAEMAENPEDIAVIMGRVNGLRQSVRSSKARIDELDRLMRETDADVNDRQAINQSIQDEIAKWPSLDKEALYISRSKVSHSLRKLVTAIRLDFDNQTAIVAVGGFIRFWVIQVDGTVKTDGDWSMLPFDILVHRAKEFFGDKIDITSMKSVYDRIDIERPPVALWDSERAAKGIAQNP

SEQ ID NO: 823 - protein, 539 aa, synthetic construct
MGRTKKYVAGLYCRLSKDDGNSVESMSIWSQKVMLKQFAESNSIAIYDYYVDDGYSGTNFERPSFKKMITDIENGKINCVITKDLSRLGRNYLQSGAYIEMYFPQKNIRYIAITDGIDTLNSNQNDIMPFKNILNEMYAKDTSKKVKSAIQSRMREGTYIGSKAPFGYLKDPNNKRRLIIDEKTKPIIELIYKLCLEGKGTQLISQELMKRKIPRPSAFVENAEKLYGLTEENKYQWSHRMVLNVLRDPVYCGNMARNKRPTLSFKNSKRMYIPKSDYIYARNTHEGIVSEEVWEQVQTMVDKRKCNNKKGLYYDNIFQGLVRCPKCGYALTPKTDYRLKKKELIDFVHFSCSTYKKYGVNACSSHRIEARDLYNIVLEDIQYHGSMALSAKEDFVEKIIEKIEVEKIDEGKELSNKLELKKNQLAELDRSYEQLYEDRLEGNITERNFNLMNVSISKKQDKLIEEIKVLEGDIEVSFETEDNYKKFMDNISKYAKIKSLNRYILNQIIDKIYVYDKEEIDGQISQKVEIHYKFIGKLN

SEQ ID NO: 824 - protein, 590 aa, synthetic construct
MKPVAYAYVRYSSVAQATGGSVERQVDALKAFTEQTGVEIKEIVQDNGVSSFKGRNVNRGQFKKILDRIDSGVIKKGDYIVVESIDRITRQRVLDGVALLQDILRSGIRIYTTSDRICYSRDNEADDLNTIIMIALIAKRANEESATKSWRRTISWDKAKKLAFEGVRKINIKNAPYGLMYDSSLGEFVLNESEAKEVRRIFELLKYMGVSKTVREMNKESKRRWAGRHVAHMIASQYPVGVLRSQKRDGEGRKEFVEYIEGYYPEIVSQTAFNEAVSAMKGRRDRKDYGSRSSDEINIFRGVVKCAKCGASLLFEKQKNQKGVPYFYLHCYSRKELKRGCDQRFRFDLAFGMFLMFVRLALSSNKPAEYVEKSSGDGGFFYKVSIGSPALINAKIGLLRNGVELSEEMDREKSNFDFALRETQGELVELFSSPTSGDIELENEFVKVKDELEKVQAKYGRLEKSIENSDGSVSKLMMKQIKEVEDRIDEKLTELEELGRKISDAKINIPIHGVQDVIDMFKVKAGRLDLNRFLVSKKIKFEFEYQGELRRLRMNVSRDGVTLLELPCQFPLHNPLKLFGLPNLAEFCDV

SEQ ID NO: 825 - protein, 528 aa, synthetic construct
MPSAISYIRFSSVKQVSSNSKQRQAEMIAGWLSANPDYSLSDLKFEDLGRSGYHGEHAAKGGGWAKLLAAVEAGAIKAGDVVLVEALDRTGRLETVDALHFLNPILRAGVSVITLDDGNVYNRESLNGPQIYLLVAKIQAAHGYSKILSERVKRSYQIRKEQARNGGPVKRAVPLWLTTDGKLKEHVAEQVKLAFELYVSGMGKIAIARRLRASGIEELSTCCGPTIDTWLQNKTAIGYWDDIPEVYPPAVSRELFLQAQKRRKDVSTPRPSKSAKHLLVGLVKCGVCGANYIMQSKGGTPHSMRCLTRQRFKDDKCKNTKTIPKNVLEWVRLQTSHFALNEALQKQQLTLSDKRRLEVEAEIEDLSSQISKIVSLLADVPDLPELGARLKGLQAQRVALQDELLVLERTEETLPAWETAYTESGMKQDDPERLNAMLKSVGYTISVFPDGLMTVSGEVFPFMYLGVKRSANAVLGFRVLWQGHEHLVAHPTSIEAITGGIPMPELKKPENAVEQFLMFRRRQGGVEV

SEQ ID NO: 826 - protein, 479 aa, synthetic construct
MTKIALYLRLSVDEADTDESNSITNQRYLLNHYLDQAPEFKNWERLEFVDDGFSGTSLNRPAFQRLMSEVKAGIIRHIIVKDLSRFMRDYLELGNYLENIFPFLGVRFIALNDQYDSMISENNGLDIDVPFRNLLNDFYAKDVSEKVKSAMNTMKRSGKNMSWLPPFGYIKDPDDRFKIIIDEEVAPIVRRIFKLCVDGMGTHKIAMLLNSEQTITPAERKMQVSQASYKTAIILTSEQERNIWTKGSVRQILKNEAYKGTYLFNTRMTVNGKQVKRPESEWERIENNHEAIVSREEFIQAQQSLASRICGSSSRSYVQPRDILLRGLVVCEHCGHRLLRFNNHNNHDYFYCRYCKSQGYSLKACRSDKIEKAIEEKLLTQLPTSSPTISKAKLIREIERLKVQKISYFQEYKEDLMTRETYLSKRRTLDDKIMNLDEQLRAYDSKNTTISQKLSKSIIETYIEKILVDCLGFFKVIYK

SEQ ID NO: 827 - protein, 548 aa, synthetic construct
MAGSSRSFLNPELVKALEGGKTFEEWLDGRIPGLDYARISGDQAVRSSTQARSKEKGRGVRHQHEGNEEVAADHGIAIVRFYEDNNITAAVPEIIRPAFVEMTKALLHRKVPEGFPVRAVVATEHERVWRLPEDYIRFRRAVITAGDGIFIEREKEYDIASTGGNIVGLVNSGVSEGEVAKTKERITRNILRRAQDGTTPGGRRRFGYLPQDPLKGRKVNEKLCPEESPWAIQMKKWALEGAAWKTIAARLRERNIVGASGKPWSGETVRQYLVNATNYGYRQLHGTLVTDKEGAPVVGKWETIGTFQEWEFICALSQKRGAKTGSRITNGGGKNPAPPEGRARKYMFSGYLRCGAIPVDVMCNTKIGGTRRPTKANPDMHEYVCNELGCGGVARNGKEIDAHLEALVVAALEARYKSVPKKDTPWEGESLLVEIKKKKKTLTSRWMEGEVSDDTFYELLPGLDDKIAGLEQDREEHHVILAEKNAFSGWDRSRWYGDPEKNILPMDLTQKRMAIGKIIRAVIIHPLPPGRSRKAPFDPTLLKVIPRR

SEQ ID NO: 828 - protein, 498 aa, synthetic construct
MIKMNIDKKSKVAVYSRKSREDPDTEDTLLKHREQLKALLTRYSFTDVEWFEEVVSSDSIDNRPIFSRLLPRIRSGEFDVVCVIANDRLSRGSQIDSGRIMEAFKESNTLLITPQKIYNMSNESDEMLSEFELVIARNEYRAIKRRLLNGRKGTVKEGRPHSGSVPYGFKWDKNDKTAKVDEEKIKIYRMMIDWFLKEEMSSAAIADRLNQLEIPPPSSRGKMWYGEVVTYLLLNDFHRGYVWYGNDEKNKGVHQPTKTEEEHTQIVERITKLRTYPDVGRRLNMNSHKLSGIVRCPYCLKVQNVHQPKGRQKHVRKCLRKSSAREPMCETTKGINEDILYSAILQEMKQYSSEIFKRNENIESAETTTISVHLIELKEKAIKKLRGRIERLKELYLDGDLDKNEYKEKLEKAQGNLMKSEKELGELYSSIEYQKAKALEKRTSLWQEQDVQALLESDEGMSDSEINIILKKLISHISYKVKDEDGKQPELSVKVYYN

SEQ ID NO: 829 - protein, 502 aa, synthetic construct
MEQYTMKGWNTMAIKRVAIYCRKSREADDKTTTSIDGQANSLIELCEKRGYTYDLYSETGSSQEWDRPEFQKLLSKIKHYEYDAIVCTEQSRLTRNTKHYEEVKEIMIKSGCVLVTPTSMTDYTNEDQMFSGDIIALIEKREWQTTRKRLMRGSRESAKKGNWMGKKVPFGYRYNRDTKNLEIVPEEAEIIVRMFNEYVSGKSTTTIAYDFTNAGITNMQWSSSSVARMIANIAYTGHSSYGRTKQYKQDGKRVTERTSKEDQILIKDTHQPIVPQELFDMAQRIRNERNSRPAALKVGKHIFSGLVRCGVCGSIHSFQTAHGKKRITSCTTRTYKEDGTYITCTNGGTYIDNFKVLFHEYFVQYVDQIEQYVHLMTDNEIQNFDEEIKRIEKQIEKLNKDIKRVQQGFVMEIFTPDEARKQIASFKEQIITLEEQIKTITAENNMSEHDKVSARLENMRRFLTHSDNIPENEANDILREFIDTIIYTKEGNEINLKIIMKE

SEQ ID NO: 830 - protein, 483 aa, synthetic construct
MRAAIYTRVSSDMQVADGFSLDAQLSRLRSYCDSQGWSVAAIYTDEGISAKDMQRPSLNRLIEDIKHGKIDVVVVYRLDRLTRSVRDLDELLTFFEQHNVGFKSATEMYDTTSATGRLFLRLVASLAQWERENLAERTRMGQVEMTNQGKWSGGHAAFGYDYKEGKLIVNEAQALVVREIFNRYVRGEGTKAILSWLNDPDHSQLAPNRRWTQSALKYLLRNPLYAGYVRYGYRTVGGRRQPDHIVAKGEHEAIISQELWERADQMRIRRTRMPANSSIGTYPLSGIARCGKCGSALSGRTSPKKMSNGKQTIGRHYICNERQHSNLCDMPMIRQQALEDAVLAEIEKFYTTISDTAPITDNSKAIERLKTEIAQVNKRRDRWMDAFEDGNITSAELRMRLDALNEQEEVLRLQLSELEDMQPVDHAFVRDVLKSFRAAWDAAEPYERKELIRIIVKRIDVHINGKVISRRPAPFRVDIEFNV

SEQ ID NO: 831 - protein, 504 aa, synthetic construct
MDNTSYIIKYVALYLRKSRGEEDIDLEKHRFILREMCVKHGWKYVEYVEIANSETIEYRPKFKSLLSDVEEGIYDAVLVVDYQRLGRGELEDQGKIKRIFRDSETYIVTPEKIYNLVDDTDDLLVDVRGLLARQEYKTTTKNLQRGKKIGARLGKWTNGPAPFPYVYTAAIKGLEVVPERNVIYQEMKSRVLGGESLEAIGWDFNRRGIPGPGPKKGLWHSNTIGRILISEVHLGKIISNKTKGSGHKKKKTQPLVINPREEWVVVENCHAAVKTEEEHMKLLAMLEKNQVVPNRAKAGTYALSGLVFCGKCKKMMRYNVRSDGYTTNSIKACNKYDHFGNYCTNSGVKVNILTDFIDREIIDYEQRIIDSDNYINTDVIEKLERIIREKEAQLTKLNRALSKIKEMYEMEEYTREEYEERKAKRQQEISALESELAVHRYEINYDSREKNKERMKLINSFKDIWSSESATEHDKNMIAKMIISRIEYIHDKGTNNLNISIQFN

SEQ ID NO: 832 - protein, 531 aa, synthetic construct
MRIPVLYIRVSSSKQVQDGGGLDDQLSAGESYIKSIPDLDYGRIQILRDEGISSFKGGNLEEGMPLREFVEQRLTKKDGDNYALIVYSVDRISRMNPWASSQFIGQTIMSGVHIHDISSRQILRQDDHIGSIISTLNLMRANSESALKSKRRLDSIESSIAESLKTGEALKGKLPKWLYIEDKKYKVKEDLAKTISDAVDMYIGGHTSGEIVKKLNESGRLYGDKEWSGPFLIKLIKSPTIMGTYTRIKDGVPLSYHNFYPAIVSNEKFEKVNALIKSVGAHITKHRVDKGRVSNLFSGFFLCAECGGVININRHSTIVKYFTCSNNYRRKLCTAKKGNYLSVERAVLEHIKGLDLSSLLTNSVDTSEIDLEITQVRNNIHSLEESISRRKKDGKLIPVEIFEALADSREKLSNLKESLPQVPLVDNISIGYVDSILDDVHPSRGLIHRGISDIVKNIKVYRVGQFIILSISYERIPDVHVIIIDNSSGKVLSAVSQTDKIVELYGIEDYKSIVGDFIDKLPNNYLRFNRK

SEQ ID NO: 833 - protein, 558 aa, synthetic construct
MPTAYAYVRFSTAQQGHEGRDSETRQTAPLEAFQKAFDLQIEPKNIVYDRGRSAFDGSNVVKGNLKELIEKLQEGDFLVVESIDRLTRQRVLVGVDMIQKLLMRGIKLYTTIDTKLYEVSDPSRDLETLLLISVIAKRANEESQTKSIRRKSAYKKAKDAAADSGKVFNKLSPPFGIRYDESQEKFVEEPDEADDIRKIFELLKDFGVDETCRRINQISTRRKWTNKAVFILIKNKMPLGTLAVFSRLKKDGKEKRIFERFIENYYPQTVSDFDFYSALKSIQERKRDRVAGRYTLNNFNIFKKVVFCQVCGSSMICTKTNVRSKTGNGGYTYLTCKDRIETGNCPAKRIRFEYAFGGLLELNEMTKLMKSNISGQEKNAYGTASLFQTLANYKEVDHRDRLEISEKIKAHSIAENQLSNLTTSLNYDEKIPAVLVKKLSALEDEIETLKKEIAILNETHDERTTLNASTSAEIIDIFKSEKGRISLNRFFMENKIAFKFELKEGRVLYASIFRKTDNGLIGVLTVAIGFPLRKPLQKFGLEDLKDIINLPPNYTDEQ

SEQ ID NO: 834 - protein, 508 aa, synthetic construct
MKKALLYVRFSTAKQELGDSVERQTEKAESWCKDNNVELLDNRFHDLGVSAFKEGGKRPALADLIEVIESGKLSVDYCLFENADRLTRRGYAHALELVNKLVGLGVSLIILDGRYVYDKSTMGNGLTPILPLLFDADRAYNESLRKSNLIKSAKAKVVDGNIIKGKLPFWISLENEVPVLNDKAQHAELMLSGKLKGQSNQSIAKQLNAIHPEGLSGKGWGGSLVRQTIKNHALYGAKVYYSTGEDGRTLTPIKKVPDMFPALVDFDVWDSLQQKRKGRTSKKSAFTGLMKCGHCGSGMVQRTNTYKGKKLMYRKCIGATEGRCHNVHLIREPDVILEKMLSSMTYTVSQDYKSQTPELMSSLEFEKELLTDARQNKDLKAAKRANAEISQLEIQLDESRANDEKQSSEVEVEYRSIFDLPTEPEQNTMFKKLIDKVEVLFLRKYGKTGAVFKLTCIQANGHKIIRTLEQRHGFGNYRLMGTHDSEKLLNEIKAMAVGSHEDYEFYDE

SEQ ID NO: 835 - protein, 523 aa, synthetic construct
MVQSMKAAIYCRLSKEDETKTGESESIQNQKSMLIQYAMEKGLELYQIYSDEDYSGIDRNRPAFNAMIQAASEHRFDVVLAKTQSRFTRDMELVEKYLHGKFMEWGIRFIAVVDHVDTDDTANKKSRQINGLINEWYLEDLSVNVRSVLDHKRKEGQYIASFALYGYRKDPAVKGRLQIDPEAAEVVKRIYAMALRGVGAHKIAQILNEEGVPSPTAYKQQNGDRCHLTRKTPYEPLWSSGTIYQMLHNQTYAGDLVQGRHKRVSYKSKRTVWLPKSQWIVVENTHEAIIDKDTYAMVQRTMQGRTRSGVGGMIHPLARKVVCSCCGCIMEQTGRPPKADGTRVRYVRCRMHQRDPGRCGNRTCTNLNDLQELVLRRIREYAEDYFDPEKVELPRRDDPVRQQAQRSELKRLKSEVERRRRAVQQLYLDKVSGLIDAVQFSEMNQSFLKEVKKAETRINALEAELEQQQEETGVVQAQMQRVRELAQVSHLTRELVVLLVDRVVVGPKDARMGGQKITIEWNF

SEQ ID NO: 836 - protein, 478 aa, synthetic construct
MKTVCAYIRVSTDSQEEYSPDAQIRLLKEYAASHDMTIIDIYQDLGISGRNADKRPQFQDMIAMAKSKEHPYDAILVWKFSRFARNQEESIVYKSLLKKNLVDVVSVSEPLPEGVIGELVERIFEWMDEYYSIRLSGEVRRGMTQKALAGGYNANVPCGYTKEKGPNTIPQIDEYYGPMVQRCFHMFAIEHIPMTKIAATINNLGYRTRTGKRWETRNITDMFQNPFYIGKIRWNSASSRRTTPRVGEEIIRDGKHQPLIDQELWDATQERYAKITARMGHGKRPDIYKHWLSGLLKCPNCGGTLAYQNGLDTKTGKHYPYFVCWKNVKGMCATRNSISAGKAAQYVLDGLLNIVEDKDIKTIAPIVQFNQDEAAIAKQIASVKAKLGRVKEAYVNGIDTLEEYKANKEKLEAEIAHLKELVVPEVKPQTVTVDVIRTVHDTIMNAQSDSEKATAINSIVDHIIYDKEADTMEFFFVP

SEQ ID NO: 837 - protein, 609 aa, synthetic construct
MALEIAAWDVPIFPRFTKRSLRMARRKRKQHSENLSSDGSSSKRLSVEARRQQIEAPSSWPSIESTTNPAVFIYCRVSDNKSVKSDLSIPDQERQAKARAAENGWTVLKTFIEAGVSAKTADRPQFQLMIAEALDSSKPVQRIIVHSISRFARNVEDYNRVTNQLYANGVEVVSLTQQFSNDTGGFIAETTTAVFDEYHSRRTSTDVTRTMTSMAKEGYAVGGVQPLGYTLRPDEVNPRRKRVVIDESERPLAAKIFQLSLYGNGDGPALGIKAIVNYLNGTGYRTRSGAPFSTNNIHSMLTNPIYMGRKIYNQNAKAKRWTPVAAEIVEIPVPPIITPDEFAELQKLLRSKNPRKGAAKTVSSPLLLSGLVHCECGAAMTLRTGTGRSGDIYRYYHCARVAKQGRYTCNGATVPEQQLDDSVVEAVIENVLVPDRLRGILDSMNEKIAVAGKHGEARAKEIRVDLEASERAYKNLLAAVASSESLGSEPILLSKLGELERDLTRHRNSLKVLMASEGNDVSITEQQINWFSNLIIRRLRKSNRASMKSYLASVVARVEVSSDDISIVGRLSDLKGEITREANIDVGLGSENTVRRYKRNWCTRQDSNL

SEQ ID NO: 838 - protein, 528 aa, synthetic construct
MTGPDRSIMAKPAKTPTPPPNTAVIYCRMSRDAEGDGEGIARQEEVCRSLAERLNVDVVKVYADNDIGASEQTSKKKVRYDYIQMLADGNAGHFTHILAYSSSRLTRRLSELQDLYDLNRATGVQFHTVASGHIDLSTADGLMSAQIVAVVDAAESRRIGERQKVTFRRRAYEGKPKLQRQRPFGWKSDGVTLEPAEADMIRDAVRKVTAGTSITAICKQWEKAEVLTSAGGSKWEWTVVHRILTGWRTAGVRTQYREPLRDKSGALVMGTWEPIITLDERDAAVMALQAHGLTKVRQGKWLLKGLVLCGVCGGRMYGALKATVATTTYSCRVGHNSITAHKLEHVVLSAVFSHVVQRTQRQAEQSEVIVPAAPTDFPEQQRLDDVSAKITELMDAYRSNILSGDLVFGQVAALENELRDLRKARDLHYAANYSPARSLTTSEEIWSEVGGGLFDLSDEDQALALAAELQGVVVKKGERGRAGWGVDALLGRLEFLWRDGTESQVASVSRTVAEDVSGFDEYHAQSPS

SEQ ID NO: 839 - protein, 460 aa, synthetic construct
MDAVIYCRISQDREDGAAGIDRQEQDCLALAAEHGWNVIKVYRENNTSASAARRRPEFQAMLKHLATGTVGGLLFYHPDRAYRKLDDLVDLTSVCIKLKIQIHTVKAGRVDLSTATGIAVAEMSAVFAKLETARMGERIKRSKQQTAAEGRYRGGARPFGYKDGGMELEPHEADAIRTASTDLLSGTSLTRISRNWNDAGLRTARGGTWQATNLRKVLQRPRNAGLVEMDGNIIGPAAWPAIVTEDQLRAVTSLLSDPSRRTTTTYERKHMGRGIFLCGKCGASMRVFKLKTPTYRCVDQPHLSIQKSLADSVVSNVIIAAFNEQGVQNLIRRSAYPAVDVDALTAERADVSAKIDERTDMFDNGEMTRDSYRKSTARFRERLTAIERELASATVPEQLEDADQFDDFRDYWESISPDRQGKIIDRLLTVTILPVGSGAQTSAAKIERIQIEWKDQPTSA

SEQ ID NO: 840 - protein, 639 aa, synthetic construct
MKKAALYVRVSTLHQIDKDSLPFQRQELENYAKYALNIEEVEIFEDAGYSAKNTDRPKYQEMMKRIRSGEFTHLLVWKIDRISRNLKDFSEMYEELKDCKVTFVSKNEQFDTSTAMGEAMLKIILVFAELERKLTAERVFSIMLSRAEKGLWNGATVPFGYVWSEEEKFPVIDPDESKIIQYIFNSYESLRSTLKVAYRLHEEKIATKRNGQWTAKTVRDILRNPFYIGTYRYNMRESGGSRRLKNKEEWVVVDNNHPGIIEKEQFDRVNKLLSDNYRGLTDVQRADIHKHIFSKMLYCGKCNSLLTAGLDAARKDGYRPSRYTCVTSGGAKRCSNYVSDIIIGPFIFNYVSNLIRLQERITPKHSLRDMERALLRGNSFIDVVGVDNESLKETHFALTGNMSGQGQEYSLNAKAEIETPNIEIERLQREKTKFVRALKRLEDLYYFGEEEDAISQKEYIFKKRDLQERLEELDDEINLLKQKNDDKTSDVFIDYAQHFLITKEMQQARQVDYRELSEIVGREALSDFMQTIIDNIVVIDKRVQSITFKNGITHTFAYRSLLQSKSSAPTKKQYKNYEGPVLEYLKENGPASRSDLQKATNITRDGIFTLLSELIEREIIIKTGQSTATRYHYNEKQNN

SEQ ID NO: 841 - protein, 621 aa, synthetic construct
MKIHKTLAPQVYSYSRFSDMEQKKGSSLARQEDYAKKAAEQHGLELNDELVFTDLGKSAFHAIHKKAGAYGAFLKAIEKGLVAKGSYLIVESFDRLSREEAYKAQSDITRLIEADINIITAADGQLYNKQTLAQNPGLLFLMTGTMIRAHEESLTKQKRSVAAIEKKLGKFFDGELVDVGGPTPFWIQRSKDDRESLFSFSEDHNRVEGARIITQSFINGKSYGQIQDLLLEKEILSPKGDVKWGTTTISKVLENEALYGRKTVRLPALKDGTKDAQEHTLDGYFPALISKDDFDLIQQIKRVKKKGRTGYRFNSAKEEGVTSVVYLLSGYGKDKNGDARSVCSKCGGALGSRLQEQFTRKKEYVRTVMRLDCLSRTRKKSCDAKGIAQRELEKSFLQAVSEHVDYNLLNKDDSDARAVEIIDSRLEDLEGVIQRAAELFLLTDDTTAHEIARQKLNDAKAEKVELLKQKDDGKEFVISAEAIKEFEGYIQRAYEDENDFEARSYVKDILLQCVEKLVIDTEPRSVESLGYKNLYKGAKVWTVTVDFRSGKRITIYHDVDTNMSLFNQVEGGGNSFHTFTPEALEIWDQQGDEAFVKHLSETGYGLNSSYVQDFISSLDDK

SEQ ID NO: 842 - protein, 447 aa, synthetic construct
MNHPSSAAIYVRISLDREDEAGVTRQREDCQELATKLGWRVGQVYEDNSVSAYKRKVRPEWQSMLDDLRSGIRDGVIFYDLDRIARQPRDLEDLIDVIELKKIPNKVVTGDVNLSDDNGLFMARLLVNVGNKASKDTGRRVARAALQRAQQGKPQKAVTRPFGYTHDYKIIESEAKLIREAYERVIAGESLTSILKDWQQIPTVEGKRWHRQTVKKILQAPRNAAIRTYRGEEVAVGNWEPIVSREVWQAAQDVFNARTQPMPDTTSVYLLSRIARCGKCGSPMYGRAQNKTRKASYTCMSALGGCGGINRQMKPVDEYISGLIKRQMAKGKPVAPPVDDHAAEIAEIETRISDLRQAWTDKQIDLSDFIAMRDAETQKLKSFERAKAQASATQISDTFAENFDDANLSQQRALIKRYLTAVVIHPAVRGARKVDFDAIEPIWKKII

SEQ ID NO: 843 - protein, 566 aa, synthetic construct
MNWTKKRKICSDVAFLYERLSRDDDLEGESYSIATQKKLLTKVAKEKGYTHIVHFFDDGISGVTMNRPKFNEMIEQLKLGKGGAVFVKDLSRLGRNYIEVGRLIEEFFPENGIRLVAVSDGIDSFEGESEFAPIKNLFNEWYSRDISKKRRISNKVKGSSGVPLGAPPYGYKRDEKDPNYWVIDEEAANVVKMIDTLTLSGYGTNQIATMLSEKMILTPTAYAVSKGYKKPLKQHTAGPYSWNSTTVIKILNLREYCGDVINFKTYSISYKSKKRFKNDPEDMMIFENVHEPIRGRATFERIQEMRGSLRRRNLSNGEHNMFSGLLVCSDCGCKLGYHFNQKNPSIKYFNCPNNNKGKLKKCMSTHYVRVDFLEQIVLSEIRRLTRFAGKYEEEFTSAVTAYSKTVLESNKRICNGELNSLIYRNSEIDRLFEHLYEDNASGKISDERFAKLSSKYESEQKSISERVEELKKAYDEMTDESNKTESFIRAVKKYTRVKKLTPLMLNELIEKIEVFQTKIVDGKRTQKIVIYYNCIGAISIPEEVPVPNVEVTLGTRQGVELKYISA

SEQ ID NO: 844 - protein, 585 aa, synthetic construct
MKDIVAYLRVSTEAQDFERQRVDIDNWCRINEWKLNNTFTDKLSGFVEEREGLSELKEYLITNNIKNVIVWELSRLGRDKFNLMTLFKWFVDNQINIFFYTQNFWLLDVNGNLSSNVSLQIMILSNYAETEALMIKERMKSGKERAKKEGRWVHGAVAIGYKLSDDKRVYIDEENAKYVRQAFQLYANGDTSIKQLAVYCIKNNFPSSFGNYQSLRFILKNMIYTGQLNYVNIPAIIDIELYMKVQSIMEEKHTNKNKEYNNNKFLLEKLVTCPKCGAKYGGGGGHRYSCVNRVSSSAKVKCKSSSFDVRVLDAIVWYITKQIAAAQELYVQSNEEQIKDFEQQKELLNNKLETLEKKKKKQNTKFDLDAISIDEYKVIIKNLNSQINLIKNEIESLNIKINQSNFEMQNNNRATRVANNMDALNKLRDLETMRNLMKIIFKSIHVYKYHNNFNIIELETRMNYIYCFYNSHSSRNKTFTTNIALKQCWDDENKLLNDKNIDAEFYRDGIPIEIISDYKYKVKSQETIDKKRAQARERERRYRENRREEYNKHARELRHKRNELKKEAEERRNNISISKPKSKPD

SEQ ID NO: 845 - protein, 520 aa, synthetic construct
MTVAIYSRKSKFTGKGESIENQIIKCRKFIEFKFTDEITEKDIEIYIDEGFSGKNEDRPKYQEMISKVKNGEINKIIIYQLNRLGRNARDIHNTMEMCTSLNCIIYSATEGFDSSTSFGRAVIGILASLAQLEREQLAERIKDNMYTLAKMGRWLGGQSPLGFNYIRETYKDENMKERSMALLRKNNEELKIIKKIYSKYLDEQSLSQVSKWSLINNIKGKNGGNLDKSAINLILQNPVYVQSNDEVCNYLKTLGYDVCGEPNGNGILRYGKGAEKVAAISKHKGIIPADKWLEVQNVLKKNKEKAPRMGRTHTALLTGILKCQCGSGMRVSYGRIKPDGTKTFYYTCCMKNNSGGVRCKSKNLNGKDLEELVINKIKIRTAEDIFNNLNNLTDSIDTVETNNNITRLNKEKESLKTKIDNLINKLSLTSDNDISQLFINQIAIFKSKIIKIDNELGEFKNIEAKIAEAHREVNINLKRLDDFKNNFDYMDFEEKKKSLNDILEKITWNSDNNEIILKYT

SEQ ID NO: 846 - protein, 493 aa, synthetic construct
MKTAIYVRVSTDEQAEEGYSIEAQKRKLLAYIESQDWTLFDVFIDDGYSAKDLERPEMQRLLQSVTDNEIDVVLVYRLDRLTRSAADCDKLLKLFEKHNVKFQSSTESFETRTAAGRLFIRLIADLAQWERETIAERVRLGMEQKVREGKKPGGKFPYGYDKSGNRIDKEFAILRRLRYMYMHENLSFKKIADQFYIENIKRRDHPWTASNVKLTLENPFYAGIIRFGSKLPNGKYTQRKVDERVECVYGESQYEAVWTLEEFKEHTARMRARSSNGYSRKQEYWFTGLLRCGKCGAAMFGRMATQRSRKDGTQIRYPYYWCCRRKENNSCNMPMFRQKHVEHLVMKHVESIIFDSNLIMNQHENEKKRIKMKANEHKLKRKVSEINTRKKKWQYMFVEGLIDADDLKERLKEEEDGKLEILRELDLLQKDCERKFDIPKLTKFKEAWTLANDIEKQDLLRTIFKQIILTTECENVKGVKNKFFEADVTVEYN

SEQ ID NO: 847 - protein, 463 aa, synthetic construct
MPISPTRKAAIYVRISLDRTGERLGVERQLEDCRALAERLGWTVAATYDDNDLSAYSGKTRPGFEALLDAIKRDEVNAVVCWHPDRLYRKLSDLVRLLDVADGVAIRTVTAGDLDLSTSSGRMMASILGSVSAAEVEHKSERQRRAFSQMAKLGKPKWRRAFGYLDDTHQPDPTTAPLVARAYASILAGGSISDIVRQWNSAGLYGLTGKPWTPTTMSLFLRNPRNAGLRAHRGEIVGPGTWPGLVAEDTWRAAQTILTAPGRGPGRKSVRRHLLTGMLTCGKCGGDQMAGKQTLDKAIVYGCKQCHGVSIRAEYIEPFVYELIAGRLAMPDAVALLEAEQDEADVEMLRTQRATLLARLDDIADERADGLLTGAQAKRATDRITEQIRSLEVQAHDAEKVRVFDGLPLGTDDVVAAVESLSPDRLRAILGVLAEVVIAPVGKGHRGTDGVRFDPKRIQVVWK

SEQ ID NO: 848 - protein, 555 aa, synthetic construct
MNNSTLTIKEYTEVDLTNLKDITIVYCRLSQDDGNTGDSNSIINQKKILSEEIAKKKLPNPIYFIDDGISGTTIQYRPAISKAIELVEAGKVKSFLVKDLSRLARNYLDAGRLTEITFPDNDVRFIAVSDGIDSDHQTDNDANLLPLKSLFNDWYSRDTSKKIRAVKQAKAKAGERMTTNAIYGYKKDPNNSKNWIVDPVAAEIVKRIFNEAKSGKSLPKIARALIEDKVETPSQRRISLGDAPTARSYSPYGWHRDTIVKILSRMEYLGHTVNGKTRTKSYKDKKIIWMPKEEWLIFKNTHEAIIDQDTFDIVQKMRQHKRVMGSPRFEAGHENLFAGLVFCGTCGHKHYYCAFEKNGTNLDHYKCSKYSRTFDRCDNPHYIRKSELEELVLIELNSLINQIQFDEGEFMKKLEHKFKIESSKQTNKQRQKLLNSERRFEEIDQIIQRLYEDNLVGKLSDERFIKMSQNYELEQSNLKHSISTVKQQLSMQENQSMDVSRFMQRIHKYTQITELSVEIVYELIDKIIIHKPEGTKRNRILKIEIHYNFIGNLDK

SEQ ID NO: 849 - protein, 544 aa, synthetic construct
MKSTTLQRTLTTKYSSLDRTEELTALYCRISNEDMNAGDSNSILNQKSILEKYAKDNRLGTYRFFIDDGYTGTNFSKRPAFQEMLELVNAGIVKTVVVKDLSRFGRNATEVGLYTDILFPKLDVRFIAINDNVDSANSNITDLDYSGFLNIFNEFHSKSTSAKVRSVLRSKAERGERIGGFAPFGYQLDPKDKNHLVIDEVAAEIVRRIFRLYLDGMTVSKIANLLSSEKVPTVTKYRQKVVDPNCDWYRESVKNILSRPEYCGDLVLAKSYIKSYKDKRKILNDTKDWLVFKDRHEAIIPRDQFELVQTMLAKKRRRTKSNRHGLFSGLVYCHDCGYRHYFCTGKSISPNQERYICSGFQSKKVKCSDSHYIRELKLQEIVLSDLNDKIQYVKKHKQEFLQLLVSKTEKDSKKELKATERRLSECQKRTSQLDIIIKKLYEDNVLGKLSDERFMSLSKDYEHEQNLLKSEILEKSSYLSEQKDKLMDVNRFISIIDQYTTLTELNSSIVNELIERIEIHQPDKSSGKRVQQIDIFYTFVGKFN

SEQ ID NO: 850 - protein, 537 aa, synthetic construct
MLVLWMRLYSYIRFSTEKQKDGDSLSRQTEAAKRYAEQHDYDYQDSSFKDLGVSGWSKKERNGLESMLTAVERGSVAKGDMIFIENVDRLTRKGFQDANDLICQIVRMGVHMRFESEGITFTNEKDLNASMNVIRVSIAAEQANQESEKKSERIRASKATRFKEALKAGKRVSNGGYPTWLNVSKDTEPTFKPYAKETIQTIAKMYLNGRSIGDISKHLNNPENGDYWRQGEWNVGKVSRLLDQPALYGVHKSRTWKADGTRFESYARHNQDGVEIQGAYPVVISKTDYDLIQAKREHNKTNLPYMRGTNESTRSRGKLIFPESTCMFCGGNMRYKSSQDRAKSEFICANKKGAGVCDSASMNYMLAEQMLLGLVFQENNLAPLFSDDQPNQELKNKIEALEIERATTLEAIESKKAQGKRYGALQDEVGDIEDEIQALKKELQALETGSVSVYEEMRTWSSVWDADAEERNKVRIFLESIVEAIEITSIKRSTKTMAVQININGNQRRLIATSSGNKKQGKHTINYIKGLFEGVEV

SEQ ID NO: 851 - protein, 580 aa, synthetic construct
MYNMSPYSLSRSFRDKPCRAVIYGRASTEHEAQVKALQNQMQWYDDVARFHPQWNVINRYIDQGITGTQVYKRDAFMRMMEDAKQQKFDLIVTREVCRFARNTVDALVCVRQLAAIGIEVYFVNDNIWTLDGDGELRLTIMATMAQEESRKISERSLAGQRVSREKGVLYGNGNIFGYTRNKLTKQFEIDPDQAETVKMIFDLYDSGMGETLVAKELTRLGRKNGVGKVKWDAGKVSKIIKRKNYLGYTVYCQSYSNNYLEQKRIKRDESEFVYVKGGFPQIISEEQYERCNAIRRSRTKRLTDEKGRTRSFGIQQAQNVWGRKMRCRCGSPMLRHRWRTNNVGKPIYGYECKRHHDTPRIRLQNEQGNPTPICEIKPVGQSKLELMASKIFERVWGDQREIVLQTCKMLDACYKPDADRRADLMKAKDDSIQLLQQQLDDLVVVRARGEIEQDKFLQRTIEIQQQMEALRQSKAQIASEDYNPGRLDMEAIEAALCEAVEMHDGLVSEDFIDLFVSQVTPLSDSRFAWCLDFSPQPTVAFLNLAGQRKYTTCSMDSKLHFGPFADEEGHTIPFPGSLRR

SEQ ID NO: 852 - protein, 413 aa, synthetic construct
MEIPINGLMNDRYAARTSEDVRRTFRTKRNKGEFIGAFAPFGYLKNPENKNAFIIDEEAAETVKEIFEKYLDGMSKLAIVRYLNDHCIPCPTVYKQKHLGMKYQNPHSDPAKNPLWSERTVGEILKNRMYCGDMVQGRYRIKSYKVHIQEQVPEDEWFIKENTHEPIIERETFEKVQRLLQKDTRTSPKKNTLYLFSGFLRCADCQKAMIRSEVKGHVYYYCSTYKSRSKNACTKHTIQHERLEAAVLFAIQQYVYLAIDYTKTIEQINRAPIVKSQDKKLAEAISQKERELTKVIRYKQAIYQDWKDNEISQTDYRRMREDYEEQEREINEKLKKLQDERAEQEQGVDTENPFLVAFRKYENITTLSREVLIELVDSIVVHEGSNISIILRFADELRRVQEFIEANTHSEAV

SEQ ID NO: 853 - protein, 539 aa, synthetic construct
MQPDESVPAVDGAVLAKLDMEMRGVPENLPSPAELIASGAKCVLAYARISDLSGKRGTSKNAKGVTNQHTTNHSTARRENLVIVRYYTDNDLSASKDAYRPDFELMLTHLHKGVTPEGYPIHGVVAVDEDRIYKLPAQWQHFIEAFRAAPDRVFADDYGTQDLYSENSEIIGLLGVAIAMGENRKRRSRTRRWHEGQARRGIAHTGGRVFGYEPVEGKPGEIQVVPEEAALIRKAVTACIAGQSWGTITKLFQESGIPTAKGGPWRDQTVKQIVSNPRNAGLRILGEGNDVYRDEHGEMKLGQWEAIITPAEWEKVAERYRPRNRIGKNKLAKGVVSRVYLGSGLYRCGNLLEDGRRCNSVMAGRKNDKGRAAYRYGCRPVTNGGCGGVSVAGEWIDERISELVLLALDQRPAVVAEVHWDKESELEAAVRRRDDFEGRWNRGEIGDERFYRMLPGLDDTVNKLRRERAAFQRANTVPVETAVERRERWYKPVEDGGYDLQQKRSILFAELSAVVVYPVGRGTQKRSLDSFKPVWNAAE

SEQ ID NO: 854 - protein, 511 aa, synthetic construct
MNNNINEKQGIRRAAQYLRMSTLNQEFSLDNQAHFIRQYAQEHNYEILHTYDDAGKSGVTASGRHDFNKLINDILFKEISIDAVLVYDVSRFGRFEDPLEGIYYKYLVEKHGVKVIFCAEDIPENLMESPFFLLMLMYSAGSYSKNLSQKVLAGHINLVNRGYYQGGVPGYGLKRSLVDNNNQFKMPLNAGERKSLTTDRVVLSPGKKEEIQLVKRIFDTFIFKGLSEYLIAVNLNREGFRYSDGSYWNRSRIHAILINIRYTGKYLYNRTSSRLQSKRTKNPESQWVENKSLFKPIISLEKFRLAQEIINSRSRQLTDDEILTFLKKKLEENGKISGFIIDQDSSGPSSSVVANRFGGLINAYKLIGYTPEIDYSFLAINESLRNKHNILLKEIEEKITSKNIFITDKKLVSINKALTFSIVLSRCRKRGNEKYQWIVRLDRSLNADLNIVVRMNTLNSEPVDYYILPSLEKFEDELKIKEDNDMLFELYRFDNLDALLDMLTPSLMEAS

SEQ ID NO: 855 - protein, 550 aa, synthetic construct
MSKYHLYHRVSKVVQSEEGHGIDRQQQSSEVWIENHNKKRVDNGLPSYSRGQIYEDRGRSGYTAANLKMGELGQLMSDIERGFIAEGDIIVIELIDRFSRAKPDFVRKQFEKILSAGVKIAITKWDIVFEEDMQGIEGVSARVLLEISIYLANQESSQKSARIRASNKTMKEKGLKHIAKTPIWLARSYDRKGHEVIPQNAEIVQKIFELKLEHGWGALRIMNHLRALEAKGKLKGFVAVDNKPNLILARYTYNDEGELVQGALNSPLTESTVNAILRNKNVIGSLNDQPIYYPPIVDEAVYYAVQKTFDTSTGGGGSGQFNNVFRNIGVCGWPDERGNKCGYSLAYERRTGTKPPKGMYLKCNNKRKRHRCKAKNVNYFQAQNTVYAVLKEIKYEVGSSIDISALEAKRDEKIKQLDTVREYMIKFPSDPSWEKDYEELLAKEALITEEIENAKARVTGTLKDLNLDLSRSEDRFRFNQIMKDYKIRVVFCEMQMVVKIGVWHDFEIRIPYNYTERDVSKFVVNVKDNMKGVILRKGRIPSLILASGKL

SEQ ID NO: 856 - protein, 519 aa, synthetic construct
MAQEKVRAALYVRQSDRVEAGIEQQIEVLEDKASREHWIVADVYSDNNTSASKTRGAGTDWARMLEDIDAGKIDLVVAVTAARLLRRRVDVIELAKPKRDVRVVTVRDGIDTSTMGGRIMLDVLTGMAEEEITEKDARAVPYRAKRRSAGHPPSGLVPFGYSWVPADRKDPDWRNRTRYVIVPSEAEIVRYMSAELLGGAKLGAIVAAMNEMGWKTREGARWTSSTVRRILISPFHAAMLPPAMPEGVKYSADRFGWSECTPGAWDAILPEDAVIAARSKLLDDTRRTHDGDTRAKWLLSTIGRCGACGGPLRMATTKTVNPVRGYRCTKGCFQRPASLIEDYVTNAVVGVLSAPGLLSWVDDGGHDIDALRLRREAIAARRAEAEALYRSRRLSAEGFADEVDELDVEADEVERDLADALRSNPLAQFVTGDDIRTIWDGLSMGRRRAVLSALVHDVQVLPVGKGRRLRTVEEIDGTVTLGWRRVERRRSLETGQATRTPKVAQEAQDAIAAALSGQE

SEQ ID NO: 857 - protein, 517 aa, synthetic construct
MLEQIEKTIYKVAIYIRLSKEDVDRGYDESESIKNQRTLLTEYVQKLGWKYQLIDTYIDQGFTGTNFNRPDFRRMVRDIENGKINMVVTKDLSRLGRDYIETGEYIEKWFPENNVRYVSVTDGIDTFESSNGNNDIAPFKSILNDMYSKDLSKKIRTALHTMQKQGKWVGGKTPLGYIKDSNDKNKLIIYEPEAQIVRTIFNMASNGNQVGTIRDHLNSSNIPTVNKSRYNKETFWENKTVKNILKNKVYIGTTVQNKRSRISYKNRKIRPNSEEKWIIVENTHEPIIDKKVFDSVQKMVIVQNYNRNEKKNMFLLDGLLFCYECKHKIGVRGKKNGNYYMICNNYRRNSKLKLCTSHGFSYSNLEDTIINYIRNLFQKIDSEKIELEVKKGMTKYDYGKVLQKLENEIKLINSNIDQMYVDKLNNKISEEMYERLFSKLKNEIKQKEKEYMETKQQKEAKQDDTEKIKSIVQDFLSLNKPTSEIMKVIINRIEIHQDKQVDLYFNFKQLNNLKEKM

SEQ ID NO: 858 - protein, 563 aa, synthetic construct
MKRAALLLRCSTNIQDYNRQKLELEKVANRFKLKVAKVFGEHVTGKDDIRKGNRKSVDELINACENNEIDVVLISEVSRLTRNFLYGVTLVDKFNRDYSIPIYFRDKRKWTIDVETGEVNLEFEKELRKAFEQAEEELASIRFRMASGKRDSAGLGQWFAGFPPFGYTRQKNGYLVKNEYAPIVKEMFDKYLEEGQALITTTRYIYGKYPDIKKLKSIGNTKFILNNKAYTGRAEANIYDEIDKVTDTFYFDIPAIIDEETYNKVQKKLANNRTTTPYPKAAKYLLQKLIKCSICGAFYTRLHSNKRDTVHFKCTSDKNSLTGCKSQVYLNERIVNPIIWNFVKEQLFYVGKMNAEQRLEAIAGENDNKSKAIEEQEALKISYKEQENKLTRLEDLYLDNDIDKNRYKERKSKIEKELSSIKAQMDRLTDRIRLSDFNIKRFNSTDFTEQYFKEVEADLEKQMKVLREYVKGIYPLYIDKVYCFLKVDTIEGMFNIFYEPRKAQQKCAYFIKDTLAQYHPDIRNFYTPNNTLLTDSDEVDAYYTLEEMKEICSRNGFEVRYRE

SEQ ID NO: 859 - protein, 587 aa, synthetic construct
MKKGIALRTVKKTAEELLNTIKVAIYIRVSTHWQVDKESLPVQRQDLISYCKLILNTDNYVIFEDPGYSAKNTDRPDFQRMMARVRTGEFTHILVWKIDRISRNLLDFAAMYQELKELGVTFVSKNEQFDTSTAIGEAMLKIILVFAELERHMTSERVTAAMLSRATNGKWNGGKVPFGYKYDKGAQEFVIDEAEARVVKLMYDLYDEQRSLLVVSKELNDRGYRSRKGSLWSPVTVGNLMRSPFYIGVMRYNYRDESGATFTFKPEDEWIMIEEHHPQIVTHEQWNRVVDTMKSQRRGQPGHGKSFNRGNVHIFAGLVTCGYCGSLMRATKDRVRADGSRPSIYNCASKRTGSDCPNKYISDLTIGPFVLNYIANIIRARKSFGVSTSIETLEKKLLRGDTFKDVVHIGRPGLEELYRHFQGTRGVEQNFMASPGATASNTEEERDLLLAEKHRKERALNRLKALYLYSEEEQAMSEAEYIVERKRLLDSLEGIDARLAEIDEALAQQINLSDEEFIQKASYFIMAQQLTEKRQIDYTRFMRKADPQIVKNFIQNVCANFCIKSGRVTSIRFKNGIEHQFFYRDPE

SEQ ID NO: 860 - protein, 543 aa, synthetic construct
MLAFSYKRFSSKQQAQGMSIERQTKLAEDYCHKHSLELSSQSFEDLGVSAWTGRNSNEDAGLGQFIQALESQKIRTPCYLLVESLDRLSRAKIQKAMRQLMDITDFDVTIVTLMDEKQYTKDMEFTDFLLAGVIMERANNESETKSKRLKAVWAKKRAEQAMHSNAPFWLDRTDEGYKINQSVSIVQRIFRLAAEGLGHYSITGILNKEQVPSPTGKGWNGSTVSKLLRSRTVIGEYQPNTVNNKVATPIGEPICGYYPIVIEEDLFNRVQLEINHRLKKYKSYRGGSTSTHRNLLRDKGKCSCQKYLSLVKKRQRYYLQCIDNRSQLCGKRAIQMDAFEKWLRQYFLSPMFHNHWIDSGEKNADIDSKINELIIAKQSSRDGLEGLLSITENLSDKLVLQRIRELSEEVSALDKRIEDLEGSKLSGNKRQSLEETSRLIDLAFAVEDMAENIAARVQLKQLLNQTFDYFELTRVDSDNGKVLYYRIELGFYGQTWKYQSIDAPTALQNAKKRHIWFDWSDKPRVELTEEQKQAVIEEFKINH

SEQ ID NO: 861 - protein, 489 aa, synthetic construct
MIIYLNKIILGGSSLTTGIYIRVSTEEQAKEGYSIANQKEKLIAFCESQGWSSYKIYSDEGYSAKDMKRPALQEMFNDMTQGVIKIILVYKLDRLTRSVRDLYTMLETFDKHDCKFKSATEVYDTTTAMGRLFITLVAALAQWERENTAERVRVVMENNVKNGKWKGGTLAYGYQLKNGNIVINEDEAATVSFIFNKIKFTGPLAIVRELIKKNIPTRTGSDWHVDTIRGIITNPFYIGYQRFNDSLKQYKGSVKQQKLYKSSHESIISEDEFWEVQEILNARKTHGSKKSTSTYYFSTVLTCGVCGASMCGHLSGNKKTYRCNKKKTSGNCDSSLILESTIVNWLLTNLESISKMLINNTITNTKGTITKEKHVNDFQKELKKITKLKEKHKTMYENDIIDIAELIEQTNKYRHREKEIKEIIHNIDKQDEKNEILKATLYNFNDAWAAATEPERKFLINSIFQNISIHAIGVHTRTKPRDIVISSIY

SEQ ID NO: 862 - protein, 503 aa, synthetic construct
MPIDPAYLHLVHPDVVWDCFLYGRNSVDPKKKGRSVADQLKDGQGLADQYGWPVKDVFKDTGISASRHARKKRDDFEDMLARIEAREVRIVVAFEASRYYRDLEAYVRLRNACYSAGVLLCYNGQVYDLSKRADRKATAMDAVSAEDEVEGIRDRNLRTTRENAEKGGPHGPTPYGYRRIYDPDTGDLVDQIPDPKQAKNVVKMFEDVKAGKSLRGIAEKMNESGEVTRLGKRWVARSVYMVLRNKAYLGKRLHKGVEYEGTWEGLVKPKLFDEVQVLLDGRLKGSGGSTAVKHLLSGLALCGVHGGMDPAQPDLGTLRKTTTARGRWVYRCNQLDLSVNADLFQAYVEEGVVAWMRTKEAAAAFRKPKDGKAAAAARARLKAIDEQLLEAREAAGQFDENGQIKLSALSLASIEKSLSPLRQKAEADLKRAEATIPAILRDLLGNPMADEVWDGLDLHQQRFVLKQVVTVRLFKARAPGVKRIEPGRVTLSFYGQEGFVPVT

SEQ ID NO: 863 - protein, 545 aa, synthetic construct
MLGNFMLWLLNRMDKPKYLIEYTRVSSGKQLKGSGLETQKLSNEQVNELCENYGLTPYSEIFSDKAVSGFKVDASLRPSFSKLLTLIESGTISNDSVLVLSNIDRLSRQDINTALATLLRVMQHVHVFIVQENKLIKRDSPDLMVDLIMVLISMQRAYDESLSKATRSRSAIRHWFNNHKEGVRTKSGKPIPNPSGGVPFWYLTSKDELRLDTKLAEAAKKAVELFADGWGVVAVHSYLNEHYTPPKAHRGGKQWCVDALRRLHRDKALIGEYHVTVDGEKHVLTDYYEPIVSEQDYYRMVNQRNKSTRTAPSGAIHLFTGYGKSFCRGCGGSLTTTTSGGRTRIRCSNDLSKRNKCPNPVHVEGDKLLDVVNGLKLLHKFIPTEGCGNSEEVPKLEAKLTELNQQLDKMKADYMETQASILISLMVQKEAEIEAIKGKLDSQRASNMQSIAEWYYPSIKTEEKRRAYFERVLDCIKVHRLAKGKTIVSLYAKSGYCTNIYFLYGKVKKVGMITQELSTERELKNDNVFNQIAKSGVLTKWIKDQ

SEQ ID NO: 864 - protein, 557 aa, synthetic construct
MSDDKLSGNVYLYQRFSSQAQEGNSSLYRQGEAQREWLRSHPNCVVVELEGKPLIDAGVSAFSGKHLSSGSLGRLVAAIESKVVPKGSIILVEHFSRLSRMTITETEKLLDKIWDHDVSIVTARDQSVYSPSKRNDLATRMRLIVEIDKAHSDSKWRSEKVKSSWSRREYNAKENKIPPKMRMPFWLDQKGKLNEYADVVRDIFKLHAEGLGQVLIERALRKKYGKIKPLKNINPTKIIRIIQNPKCIGLVYNEKLYESVVSDKDFYNSQRICKERLFTSVRPDRKWPLHGLVKCGHCGSGMSIQQSAESLPLLRCSRKQRSGGESCDAPTTFPYVVAYHFFFAYVEPLILAKISGAKRSSTSHEKKAKLTYELKGLQTKLADLKDYYKNSEKKSGTIFGLMEELDDEINDIVSQLAEIQAEIETKLNVASISKKIVDLSQTDPLNYNLELNRIGNKIILKNKELSFSLEEDDVVARFKFSQYDRKRKAYQCVFYGSKEYYRESEYVTEVRTSDWDIDRLMYPHKSRGSTVENAARLMYYLKIHSESGYLDILLKDD

SEQ ID NO: 865 - protein, 528 aa, synthetic construct
MIDTKEKPLAVPMYCYSYYRISSPSQAKGGGIMRQVEAAEKTCDENGWTMDTRFHLTDIGISAYHSKNLDDRAALGGFIKAAESGLIKLPAVLLVESLDRLSRANIMDALELFIRILNLGISIYTHYDRIHYSKESIQANFGPLLISITIMCRAHEESLIKSARTKAGWQQMVERMKAGGVGRKSIYPPWITIENXKPEIIKSEARIVREIFELCIEQNMSYSSIAMHLQEKYDRRYTQTALGKIFNQKRALGIFSPSNTEEIQAYPAIVSEDEFYTAQARIKERLNTGVGRGTXKINFFKTKLICGECGAALRMNRSSTSSIYVCRRKQESRDCGQSSKLVVDHFQSVLLYALSLVGTDDLIGKSSSEKLQKLGKALAVEQAKLDEKXQRIKNLAELVAAGSKTGASMVMRTESEIQEIEVSITALQSELDRLQSPSLPRNVQYIFQFNRRYSLGEVTKXDQEPFVNALRKVVDKIVINSPVAADQRTLVDIHLASGVQVSIVVLKDYTAEIXKDGTRIGRHIMMKK

SEQ ID NO: 866 - protein, 562 aa, synthetic construct
MRANIPDLDKLLAEKGGHINAAAYCRVSTDSEEQLTSFKNQQAYFSELFEGNNSVTLIKVYADEGLSGTTLNKRAAFQEMLESAYSGEIDLIVMKEVSRFARNTADFHTIINKLRNSRVAVAFLNTSYNTLYMSAGDIAALSIASVIAEMESRNTSERVKWGQRQQMAKGVVFGRREMLGYRIDGTEMTIVPEEADVVRLIFSMFVNEGNGTSVIANKLHDMGIPSFRHKRWTNTVILRVLRNEKYVGDLCQQKTFTPDCLSHAKKYNRGQVEKVYIRDHHEPIIDRKTWDLAQAELARRSPSEEEKKKYSNRYWCSGKLTCGECGATFVNRKHTKARAEKAKGDYLAWRCGEAAQHGARKQLPTGEWQGCCAPSVNNKVLLAAVGFVMKLLQQDNKALIDSLRKELAAVFKESDTVKSVDYTAKIEEVEGLKRKAVDLCLKGIITENELSDQKAYYDRQISEYRQKQAAVKKQEQMVREYEGRLNDCIKAVKTMLDYDSPDDTVCGRLLERIVVYKDNRLSVKLNNLPYTFDLRYQTSGKLDKFRVDFTLAESGIHIEQFS

SEQ ID NO: 867 - protein, 524 aa, synthetic construct
MHGYCRLSRDEDKENYSSIEEQKRIIKDYASSRNWNIKDEDFYIDDNVSGYTFNRSEFSKMIEKVKEGKIDVVIAKDLSRIGRNNGKVLVLIDEFKNMQKNLILVSEMGGSYDVLNDRDDTIGITTWFNERYVKDCSRKTRDHMYSKQKTARLIMGNYYGYEKVFKDDIPMLYIIEELKPAIETIFKLYVENGYGFQKISAILNTKYNYPTPSVYYRMKHLEKGRVYKHKVQENWTKDMVSNILKNEIYTGTLITHKKRTVNIRGKAVKLPKEEHFVFENHHEPIISKEIFELAQEIRKKKNEQNTSGANTKRDYYFSGMCQCTDCGSGMSGIVIRRKVKEKGYDCSKYRQFSTKACHCHEIKEKDILMHLKEFLKFTKKIYLEEIQNIKIEIKQGKKEDNKIKLQNKLNILNEEYKMLVNQKIKELASANNEMAREIIENTYKELEEEKRQNINYLQIAIESNEKKQLEEKANKLKTAVEYFDEIIKSEVPNRMILQMLIDKIYINREKMIRFELKTDIEKMI

SEQ ID NO: 868 - protein, 480 aa, synthetic construct
MKKIALYIRVSTDEQALKGNSLNEQEERLRAYCHAMELEGEIETFIDDGYSAGSMKRPALTRMLKMAREKKLSMVVITKIDRLCRNLKDLLLLVDELDEIQCGFASAGERFDTSTAAGRMVLQILGAFAEFERGRNRERVRENMLSIVTNTDKAVSRPCFGYNVVDSKYVINQEEAEVVRKMVEWMLQGEGAHRVMRRLNDMGVKTKDGKSFTQLSVGKLMRRETIAGMFVYNRGYSLRGKSLIRPEEEWIVIEEHHEPIIDRETFKRLQIAITARKTSGKQADNERWLLTGLVHCTHCGRPMFGRYRKKPSGKEYFHYVCSSYMKRAECFHHFIDRDLLENTVFDYLMDAKNYSGRTEEITTKDSQNEVDAAQLKAGLKKLDIKMQRQIELFEDADISKEDFRIARDRIHKERMAIEERLHEAETGTRVALENEFIKRLGSMNNELHSKNRGEQKNALRQLIKVVEVTNASIINVDVRL

SEQ ID NO: 869 - protein, 585 aa, synthetic construct
MTNNHQTPSPRSTSTTTRTPPQVVSYSRYSTKKQSKGFSLERQDENLKRWSDANGIPISELSFADLGISAFSGTAVREGLANMLEAVRQGAVPQGWWIAFERIDRLSRRGITETRRLIDQILQHGVNIVCIGEGIELRPDDDANDELKGSLMVAIHAHLAREQSAKASERIRSTAAAKRRRARETGAPIKKRLPYWLELSPDGSKYQFKAGRIETVRYIVKRRLEGRGFHGICAELNAMNTPPLTRMSKQWNDMAIAATVRNVALFGQYQPAITNEVEKVDSDGRRKMVRVAIPDGEPLDNYFPAVVDRATWDQIQSDSRTKMKAGRRGDNPVSGLTFCRHCGGTLPMKPASKTSTNGTRHTYRYWTCRGAVDGKCDHGKGIKDLDHFVVKACRRIVPRTLGQGDGGQDPAAAFEYQSLLERRGKVTTQIATLDAAMADPELGAAALKHIARQIDVATANLEQVDAEIATVEARQKADQDTTPEAVEKLKQLEGDPVAYNLHLKTLVHRIVAGAVQLDDGSWSDVALLFRFTVELLNGQRIDVTVSRRNRWDKDPVEFYSHSEDATSTGGEGDLFPWETDDGQDD

SEQ ID NO: 870 - protein, 524 aa, synthetic construct
MTGIINGSDQMSTEYAIYLRKSRADLEAEAHGEGDTLARHEHILMELAKSRALPIGAIYREIVSGERIANRPVMQQLLAEVEDGRWKGVLVTETSRLARGDTIDQGIVAQAFKFSGTLIVTPAKTYDPTQEADEEWMEFGLFMSRQEYRMIRRRQLAGTRASKKEGHYVPGRPPYGYERYKLDGRGWSLRPVEPQAGVIRTIYDMYLSGKGFSEIANELNAMKIRTPLDKKWVPATTRAILQNPHYAGFIPSAMKVNTKIVQKGKLITKRPVNKNCELYEGIHEAIIPRDVWYSVQQRMKDTVTPRVPRKYQQMNPLAGLVYCDQCGKLMSRHPYRREDKVRFGCENPSCSTVSSLFEDVESLVLQSLREFLHKIELSSPALLDTKSEENALQNIEKQLTDINRRLQRTYELLEDGFYSKETFLQRQSAISQDQTALLNIKHEIERKLHNKQTDIEAQKNSAPLIRHVLDVYPTLEDPKEQNLLLKQVIRRIDYHKTVRVYGKAKSDLHLTIHPKIAIPQTSNI

SEQ ID NO: 871 - protein, 701 aa, synthetic construct
MARSNKLTALYERLSKDDELQGESNSITNQKNYLEEYAQAKGLTNIRHYTDDGFSGVTFNRPGFQKMIADVEAGLIDTICVKDMSRLGRNYLKVGYYTEILFPEKDVRFIAINNSIDSAKPTDNDFTPFLNIMNEWYAKDTSKKIKAIFKSRMKSGKRCSGAIPYGYKHDTEDKNHLLVDEEAAVVVRKIYHLAIEGYGPAQIADMLTKEHILIPSAYLERHGEVSRNHSYHDPYIWNATAVSGILDKREYMGHTILGKTICDNFKTKKRRKAREDELIIFENTHEAIIDEDTWQQAQKLRKRVTKRVANGTYKHRLSGLVYCADCGSRMSYRSPEAQKRKDGKSYDSDSSFTCSAYGNRYKECTFHFITSSALDQLVDDSIRRVARFVLTDQKEFLEQVGQLRQTYSERFLQDSQKEIRAAKNRIQELDTLIKNLYEGNVLGKIPDRHFNRMMKEYDDEQQELEEKVSELEQELGENEDSAGNGDRFVRLVKKYQSFDEITPRMLNEFIDKIMVHEAVGKGTGRTQQIDIYFNFIGQFAVPFSEEELEQERKARQEEEQRKAEAKRERQRIASRKCSQKRAEERARIKAAAEAGDEEAIRQYEAILAKERERRERDRASGKRSYQKRQKKAKEIEQATKAGDPKAMKEYEKVLEERKKATARTKKWRDKQKKKALEPTCKIEPEPSELEPDQDLPVTASA

SEQ ID NO: 872 - protein, 525 aa, synthetic construct
MSMNTTTTNTNTTTTNRLLELPLLTPELRTAVERLREMAEDDWTASILYGRASQDRHKLMRSIDDQLTDMVGWCLPIEWYPEAIVRDADRSASQWRRREREGFDEAMALIESGRYGGFASWEPSRAGRDMEVYVQLRKACQRAGVLYLTHGRVYDFSRSDDTFMMGFEFLRAEADANTMRERQLRTVKLNADKGRPHGRLPYGYRRVYDQHTGVLLRQEPDPHTGQIVRDAARDVLAGKSMYSIAMRLQDAGEPTPKKPWAESPRGWDTYTVRQVLQNPTIAGKRVYRGEVIGQAQWEALIEWEDFQKIQRLFADPGRLVKGGGGMAAKTLMVHIARCHYCGRPLKRATMRKKERTPAVKYQCQFRGCYKTMISQPGLDAYVEQVVLEWFQNPTNLAWLTGDDDGDWLKVAEAAEQKRAALQARLDEVIAQYAAGSLNLDTLTKLEAALRPQIAEAEQALIPPVTDERVRALVTAEDVPAAWAGLPLLERRKIIKATFNVRIQQTQNRGQNAFEPERVLIEPRAL

SEQ ID NO: 873 - protein, 417 aa, synthetic construct
MNIINEWYAKDTSKKIRAVMKSKGEAGEHLCTNPPYGYMKDPDNKKRWIVNEAAAEVVKRIFTLCLEGFGPSQIACILKEDKVITPTIHFQQTGRATRNTPPDNPYHWTGDTVADILERPEYQGYTVNFKTYKQSYKSKKNCYNPKEKQLVFENTHEAIIDADTWERVQELRKNKRRPTRTGKTNLFSGIVRRADCGEKLYYCTSKNFEARQDHFVCSTLRLKGKEVCPTHFIRAVVLEQGVLAHMRLVIACVSTHEERFRKAMGAKQKAEAKKELAAKRRQLTQAERRIEELARLFKSIYEDNANGKISDSRFQMLSDDYEQEQEELREKLLQLNEEILQLEEQAENIDRFICKVRKYLDLDELTPAVLNDMVKAVYVHTPDKSNGHREQQIDISYDLVGILLASLLGNLSNGETA

SEQ ID NO: 874 - protein, 479 aa, synthetic construct
MKKVAIYCRVSTLNQAEDGYSIGEQQDKLNKYCDIMGWEVIETYTDAGFSGSNIERPAMKQLLKDAANHRFNTILVYKLDRLSRSTSDNLYLIKEVFKKNNIEFVSLNEKIDTSDAMGEFFFTLLAAVAEMERKTITERMVLGRLGRAKAGKTMSYQLPPFGYIRNKELDILEVVPHEAKIIKYIYSKYISGDSITKICHDLNDKGHIGKNVRWSHSSVKNALTNTVYIAKGKFKGEMYEQEHEKIIDENTFWLVQDEINKRQIRESQRTNNPRPFQAKYMLSGLMKCGYCGGHIRTVTGNKRLDGSKPVRYVCDRRSDYRKLMEPDEIKCKSGFYRRLDLEQYVIDYLADLPNDESELKEALSIGQTSEFDPTLLLTEIESINKKIDKENYLFRNDYIDEVELQRNVKNLVDTKKLLENQLQENNGDKINEQKRKRILDMLNTGNIREMNYEQQKKIVKSCISKILLTSEEITIEFNF

SEQ ID NO: 875 - protein, 567 aa, synthetic construct
MPTAYAYLRYSSKAQGGDDKDSIDRQMASIRALSAHYGVDLLPENIYRDDGVSSFDGSNKKTGKLKDLIDLILNQSINEGDIVFVESIDRLSRQKFRLSKDLVYSILDKGVILITTIDNRIYQRTDDSSKDFEQDLYLTLIAQRAHEESKTKSIRRKSAWNKAKERAEKENKIFNAHNPPYGIIYNKEKDQFEIDEDKANEIRFIFKSLQSTGVSNTIKKVNEFSIKKWTNKTIQILIDSKYPIGYYKAQKRDENKKKVFDRFIENYYPSIITFEDYNNAVSSMKNRSHRKHYGNQSVSSLNIFRHSLFCDECGATMFFETNKNPKGLKFSYYHCSRKKETRQGCDAKRLRFEHIIGLLFDAIEKTFEEYELIKDFTNEELKELEIAIEKDLEKGTEFSKSVLWMKELAELLSGKNKNNDADDKIKRLNNILIKEKMTLENLNKSIEDFGGSIPKIVLKNMIEVESKIEKYEIELNTLKSQSVIDAVLNISSVQDFIELIKKEEGRIEINNFFIKNNISFYAGFSELENSPYLEIHKDNQRIFWNFKKFDLHNPLKLYDFTKITDYE

SEQ ID NO: 876 - protein, 496 aa, synthetic construct
MLIIEHFNRLSRLPLIKSITLFNEILANGVNIAVLEERQVFTAENLTSMDYLKAVLRFEVAHAESRDKSNKGIDNWQIKKQRLRDAEDPASARAEFTKTVPLWLTVDGRDIRVDEDKAVVVKLIFELCSRRNYGFMKIAKHLNENSIPRLDNSGRAWTFDIVKRLVHNRALIGEYQPRVSVRKEGRKRLEYIPSNEPPIEGVFPAVIDLALFDEVQAKTQSRKVGGGGRRADMPNLFLKLLRCNECGGSIKHQKHHNGYKEYRYLKCYNSLYGHCVSPGNRAWRYDEFEAMFFQYAGRLNLDEIFTAANSEIETVMAEISSIEVALAKQERKIEGLVRQVYESETVSTTLNNLLVNLEQGVNSSRQQLREKHQQLASLRSRDIEKHKETLRNSRELISQSQVEPQLRDKINAHLREIIASISIDFPSRYASVTFKSGVVREFHSDGIFANLAPKAEGEQREKDLAEIFAWHSLTDEEKARKYQEAGLSIVPLKVEL

SEQ ID NO: 877 - protein, 587 aa, synthetic construct
MNKGLVFSYSRFSSAAQSAGTSLARQAEYAKAYAEKHGLTLDSGLSMKDEGLSAFHGKHISKGALGLFLKAIEAGKVPPGSVLIVEQLDRLSRAAPIQAQALLSQIITSGVTVITAIDNKVYNEATLKASPMDLVYSLLVLIRSHEESSAKSDRVKSAMIARAKQWQAGTYRKPIAPGVSDPGWVRRVGDTYELIPERAEAMRAMIDLYKSGWGALRVVQELDRRGLSIGGGANGVDRVAQLIRKRSLLGERIVTVDEQQFVLSDYYPKLVTEAEFAELQVLASERGRRPGRGRIPGIFTGMKLAVCGYCGSWLVSSVSHDKPARRDGAIRDSSRRVVCTAVKNGSRCPVGGSSQIAPIENAIMRYCSDQINLTRLLQGNSAEKALLSELALARVGAAATQAQIDKLMSVLLDDSSAAPAAFAVKVRELEARMKTERAEVERLELELAATASETPATADTWKALADGVASLDADARIKVRQLVADSFSRILLYRIGYPSYGGFGPRIAIELHGKRGSHHVIEIDRETGELIAREDIHEPILAHEYPRYLGRGMPTDPAFYDFLVGAKMQVDEDWLNSLPEKIAKIKK

SEQ ID NO: 878 - protein, 558 aa, synthetic construct
MSTSPQTPNPKHPTSKVFSYVRFSSAAQELGSSLARQYELTRQWAAQNGYEVDDNLKFEDLGVSGFKQDARREGLERLLAAIDAGYIRSGDVVAIERLDRLSRAGLARSQQLLNSILSRGVNVVAVEEGLFLTKDSPNVFNDVLRVLLAAELANRQSVEKSRRVRDAKRRQRAAAAEGKVIRKRLPIWLTMNEDGTGYTFEPEHVETVKQIISLRRAGRGWSGIAADLNADGRRVRWGKNGWSDTSTRSIIQNPALYGAYQSGEMRPVDGDESAENGRLEWVPGELVLDFYPALISYAEWRDLQPGKQGKAAGQAGGNSRTNALAGVARCAECGGTLTRKCRQRKNKEGNLVHYAFWTCRQGEQGRCPVGASGFKDLGAEVVAACRHLEWVRPSDLGDVNRARDKLEQELDRVAGVLERLQKQLVDGDADDVDIVLPLIKKAKQDKSALENELDLLNRSTSTETAKADIERLGTISGDVVAFNNLLRKVVDRIVVRRRGKLSYSFTVEQTNGHQFRVDVIRTKQGQDPVRFYNRGVEGLPGDIDVEQLYPWETDQEDD

SEQ ID NO: 879 - protein, 467 aa, synthetic construct
MKKCAIYVRVSTIEQAESGYSIGEQIAKLEKFCELHDWTIYNVYKDGGFSGSNLERPAISQLIKHAKEKRFDCVVVYKLDRLSRSQKDTLFLIEDVFLKNDIDFMSMLENFDTSSAFGKAMIGILSVFAQLEREQIKERFQLGKLGRAKSGKPMNYVKPKFGYKLVDGELVINELEADVVRRAFKAYIGGMSRVKVMEMLNDEGHIGKSKPWSRTTMTAILNSKTYIGLVNYKDQYFEGNHEPIISLEDFEKAQEIAENRRRTATNSRPFEGKHLLSGLIHCAKCGANMEIKASLSQIAKGTERYGCQNKKRVQKVNSPEKKNKTCESVTLPRVDIENSVIDEVVRIQTDENYFQSVSTQNKNTFDEKGAKQEIKKIENKINKLNDLYMNDLITLDNLKEQTASLKLSKQTLIQQIQDSQEENAKKIDMSAIPDILTVDKATQKNIINTLIKRIDVDDTTLSIHWAF

SEQ ID NO: 880 - protein, 526 aa, synthetic construct
MNILKTRTELTSGKTIYDMNLNVGYYARVSTDKDDQLNSLDNQSKYFREMINENKNWNLVGEYIDEGISGTQVLKRDNFLKMINDSKEGKIDLIITKEISRFSRNVVDSIKYTEELLNNGTVVYFLSDNINTIYPDSEFRLTLMSSLAQDEVRKLSERVKFGIKRMIKDGKIIGSSLTGYYRKNGKLIINENEKEIIEILFNLYSTGKYSFEYISRTLAKKGYFNKYGKEYSGTTLRKMLLNPRYKGYYTANLTYVESYKTHKKVEVPEDERIIYKDENIPAIVSEELWDKANEVYKSKRNLRNINNLNKQEYLDNSKYTSKIICKDHNKYFTRCGSCKRRNNPVWACREYIVGGVVKCESPFIREIELDRLMSSLIEEKISKEKEKIINSLFQKYLIVFNKNNKEELNSLKLKINELSRNREKLIELNLNSIISNDELKVRIEKIDNEIKKVNNKIESFEFIDNGKRLKEIEKKITNILDVKYHLNIYINLFIDKILVTKGITRHKMNFEIYFKDGEVKSLEFVN

SEQ ID NO: 881 - protein, 498 aa, synthetic construct
MRLFSYIRFSTEKQIDGDSVDRQTNSAKKYAQLHGYDFQNKSFSDLGISGFKNVDRDGLTSMLEAIQSGGISRGDLIFIENVDRLTRQGFQHANDLIVKIVNSGVLLHFERESVTFKSPSDLNDMMSLMKVCMSASLAFEESQKKSERIASAKQKQRNLMKQGIAVKHKAPHWIEFDEDGKCFHFGNTKIIKRVIELRRDGFSVSKIISTMNKEGFKAPYGGTLRSSTVKQWLQSPALYGAVMVEDELIKDYYPALMSYDEATKLYNKLTHKRAPENQNNHLRGLIYCSKCDSAMGLRFTTSSGKSKKKIPTFYCIKQREGGCDAPSVSNIMPLIEKMVSHMKTIENKVDVAAITARIDEISSNLERISKSVTTDNFKMMMDMMDKFEKEKRELQASLTVNNDVDTASLLSHIDNPVEFNNIARRYIDRIKVTFKGGTRRKRTFHFKLIQRNGHIVNLTRFGSGQITIGKTEILSTFGKPESEFGEEMTYLEELEPVG

SEQ ID NO: 882 - protein, 525 aa, synthetic construct
MWMLPQMSVDDIIMYLRKSRTDDPALTVQEVLSKHEQMLDDWVARNIPDDGRRIPESNRYREVVSGETIESRPCVQEVLRRVESPRVKAVLVVEPQRLSRGDLEDIGRLVKLLRYSNTIVITLQYTYDLRDERDRDMFERELKRGNEFLEYQKRIMGNGRLLSVQNGNFIGQKPPYGYNKVVIKEGKRKCHTLEPDPERAPIVKMVFEMYAGGTSASQIAKTLRTMGVTTADGGKWVTSSVKQMLTNDHYIGMVHWNKRKTVKVVEDGEVVATRPRNSDFLVYPGKHQPIIEKELWDAVQAIKGNIPPIKNRAKYANPFAGLAVCQCGGKMVRQQYVRDGVERCAPRLVCPNQSECHTASCSLPEFTEAVIEALEKGIKNFELMMADAPEDDATQQERLIAQLEKRLAELDRLELAQWDKYTQEAMPKHVFDALNKKVVQEKEETLQALKTAMETVPIRVDYEKKRETFAAAVRTLQDPNARVKEKNLLLKQCIERINYNRKPKESDNRRFGNPEPLELEFQFKV

SEQ ID NO: 883 - protein, 516 aa, synthetic construct
MAYLIYLRKSRMDMEAEARGEGETLARHRTALLALARRMGLEIGAIYEEIVSGETIAARPQMQRLLSEVEAGQWEGVLVMEVERLARGDSIDQGIVSQAFKYSGTKIITPAKTYDPANEFDEEYFEFGLFMSRREYKTIKRRMVAGRIASVKEGKYMGKTDPYGYFRVKVPNGKGYTLKLNPPQAAIVREVFNLRLQGVGCYMIARRLNARGERTSAGIAWSAQSVRNVLRNCLYAGFVTWGHKAAQPVVRSGVLTKPRRYVADYVKVKGMHPALVSEADFDAVQHLLDSTPGLPLKKGHEIKNPFVGLLYCGKCGHVITYGAAAAAPPCTGRLDCRWAACDNVSSFCADVEDAVLHALQLWLAEYEVDTDQQNSVGRELDDRAAQAQDEIRSIHTAQRKLRTQLDRAAELVEQEIYTPEYFVSRRNQINAQLTELDRALAKASERALCIDRERRASPSMLPKLQHVLEAYPTAQSAQEKNDLLRTVISRIVYLKNAPERSLGDSTIYVEISRKFE

SEQ ID NO: 884 - protein, 489 aa, synthetic construct
MRDMRAVIYTRVSSDAAGQGRSVAEQEAECRTVCDREGWRVAEVLCDNDIGASRHSARSRPEWNRLSAILQPGDVLVTWEASRAQRDLAEYVRMRDLCADRGVMLSYSGRLYDLSRGDDRFGTALDALIAEREAEQIRERVLRAKKAGAIAGRPNGRLPYGYRRVIDMNTGATKKWIPDEATAPVVREIAKRALAGESLWSISRDLTARGVPAPDIQKNAAGAWRPQRVRVMITSPTYAGLSTHKGQIVGKGEWEALFSEDDHHTLVAVLKDPARSTQGGEPKHLLSGIAKCGVCGAGMRYFGPKSLKTPRYICEKSSCVGRRVDRVEALATQVLFEYMGRPGAAEFFFGGISVDSEDATHELQRLRQRLDQAADLFADGEIDHIQLARVRRKLNPRIAEIEAKLHPTPRSPILERLVGPEPESRWIELTIREQREAIRLVLDITIDRSTAKCARTFNPRDMKIELNRRWGNTSSLGTTKTATIERPQE

SEQ ID NO: 885 - protein, 496 aa, synthetic construct
MKTAYLYVRVSTDEQKRKGYSLPEQEDRLLKYCKYNNIEVKGIYREDYSAKNFNRPEWKELFSEIKKKSSGEDKNILFIKWDRFSRNVEYAYEMIGKLRKYKTIAMAIDQPIDFSVPESTVMLAVYLAVPEAENTRRAQNTANGIRRAKLMGRYPNKAPIGFINLTLMDGKKTIAPKEPESDIIKWSFHQVAQNDHKISEIMRMANEKGLICSRSHFFRILRNPVYCGLISVKLKSNEEQMIKGLHEPLISESLFYQVQSVINTKRKTTAKRDDLKAMFFLRGFLICPVCDRKLTGSIAQGSSKKYPYYHCHNRCRTRINAVFLNDCYQNKLQQLILSNNTIDLFKCILQDQNIKTLQASYLYNQNLIERKIKEEGQVLSQGRKLFLAGVLKIDDYNELKKENQVNIRHLKKEARDIFLKLKAIDKKNQIEDKELVEVFRKFSEFDISDKKSLVSLIPPVDIDYKTGDLSLDLNQAFSKILLKKSNRKTNKKNEFH

SEQ ID NO: 886 - protein, 565 aa, synthetic construct
MLINQQTDRELYFRVYSVDDETMSVLHIYTRVSTDSQEDNTSLSNQREKGISLADRLGLKHKIWNEGAASSSKDNLDNRPVLKSLLKEIQDGNVKHLYAEYTDRLSRNQQTWAAIRFTIKSNDVLYYSGSDSTPADLTDPTDNLLFGILSELASFENDQRTRRLHTGKFNRVKEGKFLGGASPFGYRIAADKTLEIEPEEAKWVRKAHEYIAEKKTIRDIRELFRENFVRTRRGKMVWSLGSIEKMLQNTHHGGHYVVTNHKTNEIFRIDCPPIVSKELKAIVDGYFANRSHKSRVRPPRQKKTQLLQDYLHCGCDCDDAKWRVRSTEKTSIYYCPSREEAYRTTKQSHRTCDGLKSVKIEQTDDFVWDAVIESMSASHLFRETVKESALEKGSLQADEAQLRKLKRNLKESEKELKKTTEGIGVLQGRLLVQDSKEELLAAVSSLEVDREKLRARIDELRNTIDNAEKGKKWVDWLGDFDSKIEALRGEKDVDARLLFLQEVVETILVKTLDKKANLIELDIRFKLPYVGDALNRRSELASEGYELVEGGKSLKKEFTRVDGRK

SEQ ID NO: 887 - protein, 505 aa, synthetic construct
MSNPSLRAICGARVSVLTGPQKVSHLAQHETAAAWVAREGHTVVGTFTDLDVSASIPPEKRPDLGPWLTPEKSWEWDVLVFSKIDRAFRSTRHMVKLAEWCEQNRKMLVFAEDGLVLNYRNPQAGLEHMMAELFVYIGSFFAQLELGRFKSRAEDSHRILRFTERWPGGVPPFGYTTVPAEDGKGRVLAVDPEAKAVLEEMANHLVEDGWSLLQIAKWLNDQGIKSNMGKVKTNGSGWTPTSVRQVLSNLSTQGVKISAPGKTEGCKACEPTKGGCKAHRERVPVLDKEGRMIRMAEPIFSEERWGEIQDALSRRKINRTVKTRSDNPMRDGVGICGKCGLGLTIHRSPRPGGGYYLYTRCGSGCRGVSMKMDEAVDLLGQTFLENYGHKEAVEKVFVPGSDNSAELERVSKSIERLRAESDAGLITDDSEYLSRLTGLTARKRELEANPITPPHTVDLPTGETYAQTWERSDPEGRRQLLVKWKIQFILYGKNNFELRVPSETH

SEQ ID NO: 888 - protein, 555 aa, synthetic construct
MDNELVERARWGDLKGQNWAGLVRLSFETDEGPATTGNDATENTVAKPAFRPMTGRDIKSRDEQEKDNRSFVESRGGRYVYTYEEPDTSAWKRKRVRLPNGEIGYRVVRPVFEGALEDLKRGLAPNGERLDGLIVYDIDRLTRDNRHLEDAIEVVQNFGRPIIDITGSLDLLTDNGRTVARIVTATNNKQSADTARRVTRKHRALQQAGIPTGGTRPFGWQEDKRTLDPHEGEWRRQIILWVLAGKPISAMIHELKTANVSTASGAEWSREAIKAIVRSPRNCGYRARQVIDIDPVTGMQNTRVEIVLDDEGKPVKGLWEPLCSVEEWEAATEILGSNPAPGSGHNTRKYLLRGTLRCDRDGCSTPLRVMKAPKSRNKPEGYFYYVCPSSGSVPAGCGGTKIAGPETDKAVSMIVIAKHQEEAAKRKSASEPVTWDKAEQLERVREDIDDLKSARRARTITAETYFAELAGYEAEKRGLVAERNKIQRQEAAAKSSPVDLALEWDGLVLSEKRGYIEDMLLAVLVSRAVGRGRPVRDRLTPVWRPKGEQAQESSL

SEQ ID NO: 889 - protein, 525 aa, synthetic construct
MTDLRKTAVYIRLSAEDDNVDGRAKKESDSVTSQRILLKSFAIDELGVAESDILEYVDDGVSGTHFKRQGFQQLQDDMKSGEIGCVVVKDFSRFGRDYLEVGFYIEYIFPLLQIRFISINDSYDSAASSGMTGGMNVALQNLVYNMYSLDLSKKISSALQTRTRNGTRLPVNARYGYKKGKDGRLEVDPEAAKVVKMIFRMAAEGTSFADITRELNKQAIATCDEQKLSRRDQVQFQRFDTIKKKHWSPTTVAAIVRDEIYIGTRIWGKTRCSMHTGHKAVLNDETEWVRLENHHTAIIDRALFEKANEMHPKKKRSVAESRTNFTLERRKKQPALLICANCGHSLLKETEHLLKCSDARTNGDPVCRSLVIRREPLEENILGLVHQYAASMLEKEKKVSSNRQCDYKEINTAELQKQSRQLTSEKMKLYDDYKDGRIDRDSYKQRAGKISVQLEEIKRKIEDAENSKKLLEQNELSDKIKLKDFLGIQKFDTEKLREIIKVIRVHSQDEIEIEWNFDDIFSEQR

SEQ ID NO: 890 - protein, 475 aa, synthetic construct
MKCVIYRRVSTDMQAEEGFSLEAQKMRLEAYAQSQGWDVVDDYMDDGYSAKNMDRPELQRMLKDARDRKFEIILVYKLDRLCRSTRDLNDMIEEFEENKVKFKSATEVLDTTTATGRLFINLIGTLAQWEREQTAERVTETMYNRAARGYLNGGPIPFGYKRVDKKTIIDTDEAKIVKMIFKDALSHGTHWICKKLNDSGIKSKTGTHWSKITVIQMLRNPIYCGYVRYGYTTDNETVQTKIQEEGFTPIISEEFYNKVQISMDHRSKKSAKPRKNRYHYFSTILVCPHCKGRLSGVSNVAKGKEYRYYRCLNSLRGDIVCPGIRLRSEDVDKEFLNNLNIIIDDISINDTSDNNIDLDLINNQLEKLKVKKARIKELYIDGIIDKGEFQRRSNDISLDEMELTRKSEVEYDEISKEEIISTLRNLKDNWDIFSDEVKAQAIGSLFDSISIEVAYKDKNRKRLVELFEIVGYEFK

SEQ ID NO: 891 - protein, 534 aa, synthetic construct
MTDQTHAKVQTRHLKRGAYLYVRQSTLRQLFENTESTERQYNLRQRAIALGWRIDQVVVIDSDLGLSGASAVDRHGFQRLVAEVSLGRAGIVMGLEVSRLARNSTDWHRLLEICALADCLILDEDGVYDPAHFNDRLLLGLKGTMSEAELHVMRARLRGGILNKARRGELEMRLPIGFVYDTESRVRLDPDARIQESIRQLFRTFRRTGSATATVKAFREQGLLFPHRVHHGARKDDVLWSELDHSRVLWVLHHPRYAGAYCFGRTRYRKHPDGQKVSARLPSAEWVSLIRDAHEAYVSWEEFEQNRDSAPSFAHRIWRISPGLATAPVPHVAPLFPDRCPVRGRSRATPEHVQGTRRVPDYMCQRHGIEHGRPVCQHVHGGERQSGSQVLAVPPARLSRPAWILRQTPRAVVAEMDRLLNEYTESETAEQLNRQGHISGWGKQFNSRMVTRIRLSHKLPSHHDRLRARGMLTQDELAERLDVMPTTVKTWRRAGLLVAHRYDDKGGYLFEPPGADAPVKFQHQGKTRGRRSAT

SEQ ID NO: 892 - protein, 581 aa, synthetic construct
MMVKIAAYARVSTSSEFTNQKNSLKTQIEYYQSYANDKEEMELYKIYHDSLSGTGWEKRKGFREMLYDAGLNIGVTEAGTEVLELSNRRPLFNRIVTKDISRFTRNVADDRIFKLLKDKGVYVDFTNAQLSTEKSSEEMMLQILATFSQRESKDRSEKVMFGLTESAKKGHIRMKDNLYGYRLNKELNTLITLPDGTKALTNTLEIIHKEAEVVRKIYQLYIEGNGLRKILQYLETSNILRDGKHFSQSTINRILCNPMYKGTLVRNKLAAPLVFSNKKSATLKDEKEWNTFEDRFPAIVDEETFEKAQHARLGRLNQNRKGIKTQYGKYSGKVICKNCGKSYVQNTDKFGKLFMNCATKKAKGSKACSAKNIKNDWLDEAVNAFLGTSIENSILLFKNSYIYELKNFKLELYGGIDNQKLEEAEKLKLKIEEVAERKIRLGTLYVMGNFDEITLKEMATQLDIEHRILTEKYQHCILSNEGIEEAIKEIDDTINNIKRFSLLNELTDENDLMSQISKIYIEETHGTIYLKDDMSSDSDSKHKLHFLFEFKLFERLNKIVEKYKAIGKIHTDNIITVSREL

SEQ ID NO: 893 - protein, 649 aa, synthetic construct
MKPKAYPYIRFSTSIQEKGDSIRRQTEKAVKFAKDHKLDLDTSLELHDLGVSAYKGGNLEQGSLKRFIDLVENGTIATGSYLLIENFDRFSRMNPRKAISPFLNLTNAGINVAVIDDNRVHSDRDGSIELMATILSMERAHQESERKSKNVRSAKYKAKQQILDGERKTLWKWGTPKWLDISEDGSEYIVNEERVKVIHDILDWVIEGRGTGWIIDKLNEHGVQPWESGSGIRVTKKKPKHWYNSQITRIVNNRALIGERELIVTDEDGKNERIEVIENHFPAVVDPDKFKAAEISRKSRDLNRDEDGKLKAGAQNRGGGRKGKTITNLFQKLAVCGYSVEGNMSKYRCPDSNRFMVYANKDRKDDTGKVHRLRYLQCSASREKGSPCKDCKKLYRYEDFETAFLTHVRDVPVETIFGTNENLTSEVGKINQEITVLQDQLSVANNQVAKYKDAMERSDSISDTLLTQLLKYEAQQKEIPKKIKALQSKRRSMNAQHEQGGAIKKELIHLIDEMEKCKDDKELFELRFKVTSLLKGVIDTIEVYNRGNFFDAGVMSQKIERLREKMTSKVSEEEMGLMIESLVANAKEQYGQEDKQPYFVVRYRSGESKMIAHHPNDPTKLMIGMKWDDAGLSEKPYFRDQNGEGNKFD

SEQ ID NO: 894 - protein, 539 aa, synthetic construct
MNIIYKGVIKIRAAIYVRKSRLSEKGESINNQIELCKKYFSNLHLEDNIEFIIYQDEGFSGGNINRPEFQKLIKDVKKRRFNYLVCYKLDRISRNVADFTSTLKILEENNVNFISITEQFDTTSVMGRAMINISATFAQMERETIAERIRDNMLELSKTGRWLGGTCPLGFKSIPVVYESNGHKKKMYSLEVIDEEIEIVKLIYNMYIEKHSCSPIARYLCTNSIKGKNGGDFSRNTVLQILTNPVYCTADKKAFEYFKSKGSTIEGNANSSNGIMAYNKRKNGRKDNPMDQWIISTGGHLGVIPSDKWIQCQQILDAVRKKSNNKSGTGNKFLLSGLLKCEHCGSSMCSWSRNNPKNNKYERYYRCELKNRASKRCTCKMLNSDKAEAFVIDLLKNFNIKMLDNFKSKSNSINAASIEKEKNLLNKSLNENNKIISGLIKKIALLDDIDILKAIQSEIKNLKSDNEVIEKNINDLSIKSFIVEDETENKKAFIESLNLFKNTIDFIDDVEIKRNMIKNLVEYFTYNSDTKQIKFKIRL

SEQ ID NO: 895 - protein, 530 aa, synthetic construct
MKRVWCLFRVSKKQQVSTDDDIPMQKNSCHEFVKSKTNWIITNELYEKGVSGWKKTVNERDEMAILKEGALNKEFDVLLVFMFDRLGRREDETPVMVNFLVQNDIEVWSVKEGQRKIESHTDKLLNYISFWLSDGESQKTSIRVKEAKKQLSEQGYFQGGSPPIGYKIVETAEQHWKNKERRVKELVPDEDESEMIKLIYKLYVNKHMGYRKIADYLNENGYRNRDGKVFIVSTLQRILSNSIYIGLKRYKNAVGGTQPYNEKLRIIPDELFNQAEQIRNTRSSNINEQDKSAIPRAGKLMFSGMAYCKYCGSKLTSNYLYRNSKYNNKDGFYKNTIYRYKCPLNKGKLYCDHQQNIWGGKKFDTLIINKIKFILSQFELKSFLDISKNTKADLLKIKERNVHTLEKEYLALTKQQEKLNLEIGKTLIGESSFTTEQLSAAINVIEKQTEEKLSQLNSLKEELERERENYSDVNYLANELDNWEQKFNDADDDLKKAMLSRIIDKVYLGKNEIEIELNIWLSDYFEGKFD

SEQ ID NO: 896 - protein, 588 aa, synthetic construct
MSESDPKSNLAFVYCRISKDRSGAGHGVERQRRDCEEVAAREGLTVVEVFVDNDISAYKKKRRPGYDEMVSRLSEVGHVITWHTDRLHRRPAELESYLTATISENVFTHVYQGGNLNLTTSDGRLHARMGAAIAAHESEHKGDRIKSKWKQLAEQGRHAHGARPFGWDLERDDTDKAERLASRLVLNEREATELRKAIDGYLYEGRSLGAICRDWNDPEREGGPVLTTLGNRWTTDALRQVFVRPRNAGIATHQGMEVSRGKFEAIVSEAQLRAVQRKVKERAAPKGHTNKATHLLSGIALCPCGASLVAGARRQTRKGEHYWVPTYKCLPDRPRRGEGPHTNKQVDHLDDAVKIAVYEWFKHPYKFLPKVSPEDEARAAEIESERRELGHRRDNMAEALAAGTLDIAAYSAATTALSTRERELDEELEALGARMQAVPSPVEPQDVPRVAVDPFRLEQADRLYRDWLTWPLDDQRDFVRRHFRVQVLPTPKGAPRRFDPALVDIRLVNEGEPVGAHLGATHDAEDTDAGWPVSGDRLGVYEPAGDFRERRAEYERLAARLNGDDTPPASAKGSAPSARWEAGDGAEA

SEQ ID NO: 897 - protein, 516 aa, synthetic construct
MRQPTCVIYDRLSRLFAEEAPDHRIAACKAYAEQRGWKVVHIATDTNVSGASRLEDRPGMREVLSWLPRADYVLASKLDRYARSVLEFQRLLDAAKSTRTTVVTADGVVSPENASIIINVLAAFAEYERDMITARITDSKKHFRARGNHLGGLAPYGYQVTGPVNDKRWVIDETSAAVVRDCADKLINHGASITGLTRELNERGIPSPADHARQRDGRKMRGTKWSSTTLRDVLYTPTLRGWLVQATPGDKRSALTNQPVLDVEGKPVSAGPEILSAAVWSAVRAVLDSKAKGRGVDRSGKSLLLHVARCSECDGPMYRQRREVNGKDQSTYVCRNGVGKRGIHKPNVITAHYLDELVSADYLKRFGTFALMRWAELDGSAVLQLSEVTAQIERLAGNLSALDPKGAAARVVISQLTALEQRQAELQAEAAHSEGRWVSSGGTVADAWKARDDEGRRALLTDLGARVVVRPATPGAPKRFDPQRVMPTYEGPAWWRELDPAAAHLEAIALEEELAV

SEQ ID NO: 898 - protein, 529 aa, synthetic construct
MTDFIVYGRVSTKTQLNDGKLGKEIQLSPVQKIVDDHNGRIVSQYFDEGLSAYKGEHMADGAGLKEICEDVRNGRYKKGTVLLMYSLDRFSRQEPDEATHYFTGLKMKEVSIWTYIDGLQKYDNEWSLFEAIIKLKAAHEESAKKAARLRDTWNKKFELLASGQAVKMTAYPFWIAFDEAARKYVYNDFAEIAVTVLNDYLNGVSRSLIVKRLNASHTPFYTKSKHPTKPQLWTRDHLKKLFNNTAVYGQFESKRNTVVIENVFPPLITKEQYETIQSMKRVRKAKQSDNYPNLFNGLLKCGYCGGSLTRRKSSNGSYSYLCVSAERCSRKKSIAAKLLDPKVLKYLQDLDWSFMNNDQDKKPFLEENIAQKQKDIAAIEGQLDSNFDEYLLQLRRKHVDERAALVLELEQYQVTQQSYDFDAQILLNAANDMRLKASKAMQLLIERIEVFTSGQIDLGVDPMDKKQVEQWKKRNKDAIYCDVYFHKWNEGKQESRMIGISHDYVADMTGTPLIIDKRAFDAFKKFKSS

SEQ ID NO: 899 - protein, 516 aa, synthetic construct
MAGIRMENKIYEVGMYCRLSKDDGTDNESASIATQKSILTDYVKKQGWHLAKTYVDDGYSGTNFQRPSFQNMIKDIESGLINCVITKDLSRLGRNYLDCGLYLEVFFPEHNVRYIAVNDGVDTLNKSAMDITPFRNILNEMYSADVSVKIKSAYRARFQQGKFMGTTAPYGYVKDPADHNHLLIDDKVAHVVREIFDLALAGNGIAKIRKHINKQHILRPAAYAAGQGATGYERYFEENEENRYIWSENSVRGILRSPIYAGNLAGYKRIAANMKSKKRPSKLPEEWEVIPDTHEGIVTQEEFDTVQQLITSRRLPENKGGFENIFAGVIKCADCGYAMRAMSANRRKRPDIIDCVQYSCNNYGRYGNIMCTAHSIEARDLFNAVLTDINRFADMAVNDEKAVRAIEKRLTETDQSKAKALEKEQRKLNKRLAELDRLFSSLYEDKVMERITERNFEMMSGKYQKEQLEIEARLKEVTETLSDSYEKTQGVRDFLSLIRNYQGIKELDATIINALI

SEQ ID NO: 900 - protein, 567 aa, synthetic construct
MTSQQPKVHSYVRFSSKIQEMGASVARQMEITRRWAESKGLEMSDLRFNDLGISGFKNVSRPGLEELQGAIKVGAIRVGDWVAIERLDRLSRGTLSDVQGIIVSILKQNVNIVAVADGLELTRNSLDQLADVIRLATLSDIAHKQSVEKSLRVRDAKRRQCDAARNGAKAVRRRLPLWLERRPDDSGYTFNNYKDTVELIIKLRQRGRGWHGIATQLNEEHRAARWGKGWSDTTVRTIITNHALYGAWRTGKQNIDTDNKFFHGEIIPDHYPALISKYEWLELQPKPKSKNQPAGGRSRVNPIAHVARCAGCGGALIYKKSTRKSGDSTREYHSWVCRNAADGRCDVAGKSGFRDLGKFVIQAVSQFQHITPNRINVSEAQEKIQNEIVQYKERLAELRSALSKPRAGSVSALLDGIEDAERALELLYKQLDGLVVEDSTAEDIVRLGTLADDPELFNNLLRKLVKQILVTRKGRLSYSFTVEQVNGFTFRVEVIRVKQRGEPEVTYWTEGSLYPEKLFDSELREGIADLDDEGYLQQERIKALKSSRTGRLYTKQQRPQRFAFHRV

SEQ ID NO: 901 - protein, 492 aa, synthetic construct
MNAYLYQRISSKKQTAGVGLDRQLENALSYCKQHSLTVIDTQQDVASAFHAKHLDGHLGAFLAAIKDKLIEVPSALVVESLDRLGRDHTLSALSRFIDIIQAGVEIHEVSTGTVYNARDTHLLHLALAVMERAHNESYMKSKRSKDAIQRKLSAAKDGKIIRKNVPVWIDVIGDALQLNEHAVTVKRIFDLYLSGMSFRAIARELNSTCTPYPIKQAAKKLRVERWGSARVSTMLSSPAVYGQFTPKDGDVIEDYFPAVVDVATYEKVKSIRTTRQVKATKITGLLSIVSSCCVCAECKHSYICHYRSWTNAEGKEERINLRCNGRMSGTLCKGKSVPMEVVEQHILESLPNVDISKLNRNKMRTLDNLKAKREQLQAEMENLIDLVAMGSAVAKEKFKAIQERAEQLDTKIEKAAERILPEEVVQHNAAALNPENLELRRKVNSALQLMGLRVEIDAHAANSATLNIFLKHQHIETKKIQWNRKKRIDARS

SEQ ID NO: 902 - protein, 534 aa, synthetic construct
MDTQRLPRAYSYVRFSTPEQAKGHSLQRQTDAARAWAAATKVTLDDELTFQDKGVSGFTGANRETGELGVFLERVKDGTIPHGSWLLVESLDRISRQAARRAVRVIEDIIEHGITVVDLSDGGREYSAETLEKDPFLFMMMVLKFIRANEESATKGVRVAKAHAARREKFRGQEKLTKPYTLKLPAWIRWNTQTASYELIEHRAKLLRWMFEMSDDGTGAHSIAAHLNDTKEDTWGAGKWKAKYWHRSYIRKLLTNKAAIGVFVPHTVRKIDGKRTKERTPQEPIAHRFPAAVDRDLFERVNARLSTTAPRGKNAKEPTRSIFAGLMKCQHCGGTVTRVNKGQQVYLVCAAAHGKSGTCKYESVPYAEAVSAFRLRLLGTLDDAPTGSNTADMDAKIEQLKGTVDVGEGYVNELLELRITDKSRAASQRLRDAERELDEHREALRKLLERRDALRSTNVNMRLAAVEKALTREPMDTEEANKALRGAVSKMVMRPQEAGLDIWWHHAETPQETLFMTSRFNWDANSIENMMEED

SEQ ID NO: 903 - protein, 526 aa, synthetic construct
MILRMISNPRVLGAVRLSILKDDTTSPEKQRHAVEHWATGPAVDGRVVGWAEDLDVSGAMHPFKRPGLGPWFSERADDWDVLAVWKLDRLSRKAGHFAEVFEWCQKNGKAIVSVTEGIDMSTPMGKMFAQIIAAFAEGELDTIRARALSGSAARKAKGVWIGGVEPYGYHFDRQEDGGKKLVQDETYAELFREITTRLRGDWTAYKIAHDLNKRGVPTWRDHLRITKGEEPRGISWTANAIRAIIMNPTVAGIYTHKGENVVDENGENVRITDDPLMDFTEWSELVATLKSDRQVRRATPSRSMLGGVAVCKNCGGRMSSNKKIKSSGRVHHYYSCNNVNMGTCPYPSRIRREHLDQAVDQFVNVTLGPLPVMERVKNSISQAKIELSESEATLDRLETDYRAGRYKSDVQIERYWTQHESQSVKVERLRNEIKSAEAAPTWKETGRTYTEEWAAKDDEQKRVFLQRHGITVTVGIAEDESRRVTCKMPELAEIAEETGLQIPEGYLWKEPVSEYSFPARVASARK

SEQ ID NO: 904 - protein, 415 aa, synthetic construct
MFNDYYAKDISKKIRAVVKIRGEAGEHIASNPPYGYVKDPQNKKKWIVDEEAAKVVRRIFDLCIAGKGPMQIAKILTASKVLTVTAYNAKQKGWAMPDNLYQWCSKSVTTILERTECTGCTVNFKTYTKSLKFKKRMVNPKEKQRIFEDTQPAIIERGQRERVQELRTNKRRPTKTGKTSIFSGLVYCADCGAKLYYCTCNTYKDDSQNHFVCSNYKSNTGSCQIHYIREVTLYKRVLECIQGTLSYVQLFRDDFTQEMLAQDEASRKAELTQKRKALSGAQKRMEDLDKIIQRLYEDSVLGKLSDLRFQKLSAQYETEQAEIQRLASSLEQEIENETEQIADVGRFLQLADRYSDLQELDASTVNELIDRIVIHSPERIGGRKHVTIEIYFTYVGKIRIPLYKPDIPAGTEKPA

SEQ ID NO: 905 - protein, 498 aa, synthetic construct
MITSTATLTGREYLRVSKDKSGDERSPEEQHDENVIATAEAGIVLLEEPYRDVGSASRHATKARKGFDRLIDDLKNDTFGADVLVIWESSRGSRRTGEWITLIELCEERGVKIFVSTHERLYDPGHGRDRKSLIDDASDSEYESWKIRERVIRAMNANVATGKPHGRIPFGYRREYAQMRNARGKSAMRPVGQMPDPTEAVHVIELFQRIKAGDPFLAIARDWEVREIFTRSGAPFKAANLRSMATKVLYIGERIHKGKTTPGDWPVVADFQGSPMTPDEFVTLFREVQVILADPKRQTTRPGGAQHAYSRTIKCGECGAGEAVTYVATGGRAEYTCREGGCTKIDKEETDKIITPEIVRYLARPEVYHAVVPEDGGAELDQVRSQLTVKRAQLEAFENEDPETPAEARLIARKIEKLEIEITDLEQRESELTPGPSPLAALFDYGPDVEKRWEAKPVAIKRQIAALLLRPDVLGEVRIMKATKRGSVSDRIKWATIA

SEQ ID NO: 906 - protein, 604 aa, synthetic construct
MKSKLFSYIRWSSAVQGKNGGTTEERQLEGARRYALKHGYELVTMIDAGVSAFRGRNAARASNSTSKVGELGKFIDAVEEGLIPKDSVLYVESQDRISRSDIITANKLFLQLLDLGITIVTGIDERSYSKESVNTNPFDLMYSIMLFSRANEESNTKKNRVEDNALERIKRFKSGLPTTIKSVGSHPFWIDASTTYDKQVRKHPQYWQVAQYAMELFLEGASAFKVCKELNTRFPEGWKGKMWSVPNVRKLRTNPAVYGLRILSVKGIEYKLEGYYPALITEAEFARLQDIQQNNKYITTGEKNQINLMAGLRLFRCGHCGSTMMAMRHKDKIRYLCEKGRAAGNLKSKDDKLKKLKGCRTWSLSGELVEHTLMYAMTYAFIYKNKDNKEKIDYETQINDTKEKIFSVTARITNLTELISAGLGNVAEVVESIKKLNEERQVLNLHLDKLQQNNLLQESSHFEELMINYFENIQWPIIKTVDHPERVKIREIVRSTIDKAVVWKADKKITIYYVTKDGTDFTFEAGDEKDTWRFYFGVPDLVKRSDGFEQAKQALEMNNELFDKILALKNQEAEAAGNALKTVVKALQVVGYPAIDGKLFWPRK

SEQ ID NO: 907 - protein, 455 aa, synthetic construct
MRTLIYCRISADREGAGLGVERQREDCEQLAETLGWEVVDTYADNDISAYSGKRRPAYESMLGALKDGRASAVIAWHTDRLHRSPAELETFIGICAEKSVVVRTVQAGELDLSTPTGQMTARIVGAVARHEIDHARKRMALAHAQGAANGKPHGRMPYGYRAVLDESGTKIAKRVPHEDQAPIVLEIVDRILTGESMWSIARDMNDRGVPTGGNTKAWRASNMVEMIQRPVYAAIRTHKGIATPGQWQALITVEQHDRLVAILSDPRRRTHQGSAPKHLLSGIATCGECGATVKRLKNHGYPAYACAGPNHCVSRSQAWVDKLVEQAIIEWCDQLDPAELEAKDGAPDYRAEERALQARLDEATDGYANQVLTLAMLSRIRATIEPQIAEAQRRARESSKNPLVSYLAGAGAAERWDGMNIVDRRSVVRALCTIGILKPPPGRRLDPADIVLAWL

SEQ ID NO: 908 - protein, 633 aa, synthetic construct
MVHSPAKPSITKSEATPVATKFAVSYVRVSSAKQTKEDRSGLRRQERDYERWLQKHPEYTNLDGLVLRDLGVSGRKNVKQGALGLFIKKAEKGEIPANTCLVVESMSRLTREEPYYGIGLIRGLWDLGHNIAFTQGSWRGEILTGRESGIHGRIENALEAASFEWEDKQARINEYHTDVYKRLEEGDLSHYVSRKGNNGRMYPFWLDFDDKINDFVEIPEKVKLVQRIFKMGLTMGAKKIAFILRNEGIKNPANGTAKEVTEQTIRGIHKNRAVFGELTKKGTTFRKFPVIVSLEEFNAVQVATKLRSTFTGNPTANNKLVNLFQGALFCGACGGRIDVVNKKRDACINKGEKNGLKKEVSYRQMFCHHGRNKTSECTVRNAVPYMYEHSGVDNELTILKQIQTFRWAEYFTDEKHEEELKVQINKRNNFLKQRNQAKDQIDKYDRAEEKYIEEGEILPKAIREKRKEAYAKYEELDGKYNRAVLDIQNLKRKKTGKQAEKDIKFRVQEFLNKGRFDVSKRSEFNMWLKEIGIAVNVLIGERLRKYPNNYGFEIGIGMFDFMSGKYRGIDTSSEDLIALGVDKKQVLEAQAKQFNNYKKMSLEVGHDIRFPQPKKEVKPITKEEFWKRVEESK

SEQ ID NO: 909 - protein, 506 aa, synthetic construct
MNKVAIYLRLSDEDYNKMDESISIVNQRDYIRNYIENESSLKSCEIKEYVDDGYSGTNTNRPAFLRLIDDVKEGRVKTIIVKDMSRFSRDYILLGDYLSNIFPFLKIRFIAINDCYDSINENGNGLDMDMQFKTLYYDLFSKELSEKVSNSLKQIKSQGKNTNWAAPFGYIKDPNNKYHIIIDKKTAFIVKEAFDLILRGYSCTQIANIFNEKGYITRSERKEELKLSDYTGNLITGSRVKKRVWTSVCISQITRNELYTGDYVYNKYKETRIGRRKKILLPEEEWKVIHNTHEAIISREVFDEVKSIKEKRKFYVYTGKKNRSIFSGKIFCKECGRPMSFRCDSRQKKNSDKIYKYKSYYCNLCKAEKTPNNIKEKDIIELIKPKLKDFKIQNTLNEEKVIEHKNVKEEILKEISILNSNLQIIYENYKKKNISKEDYLKEKTFIQDKKILLESKLEELKSEKIDPRKETDITVLDEESLLKVYLDNKIDKIIVSRSGEIEIVEI

SEQ ID NO: 910 - protein, 548 aa, synthetic construct
MVIIVIKFIGDYTITIDEIHEMLGNIKALIYTRVSTVDQVDKFSLSSQVDQCVSFAFEQFGYLENELVILVEEGESGDDPNRPALNNGLLLLEKGVGKKLIVLHPDRLSRSLSLQTRVSEKIWGLGCDIEFVQFELDPNNPESVLMYNIQGSIAQYNKAKILANSKRGRLKKIQSNQMMGIRRIYGYSYDKTHDILAINEEEEKAINKMVDYLLNQELSISEIAKKLSEEYVKAPLGNVWYQSTISKILKNETYTGNFYYGKTESKQVNGKKTKVDKPREEWMKIEIPAIIDQSTFDRIQEKIRKLTKTKTGRPSKENGLIRGVARCGRCGSAVSINNISKLKDKTLRYYGCNRKAKKGYKVGSGEVSHKLCKGKTWRADIVDRFVWQWLCDKLQFPEKIFAEIVESQSDNKKIQELELKKERFELLLNEKNLMYDKFLDLYASGIIKTKEALEQKINPIQNQIDEVNNDLLNVREKLNAIQAGYDELETIKQQIKKWSFLINNQVLEFSDQKRFTQMVIRKVVLHDDNTIEIHTPWASFNGEYGLGK

SEQ ID NO: 911 - protein, 438 aa, synthetic construct
MHKAAAYARYSSDNQREESIEAQLRAIREYCQKNNIQLVKIYTDEAKSATTDDRPGFLQMIQDSSMGLFSAVIVHKLDRFSRDRYDSAFYKRQLKKNGVRLISVLENLDDSPESIILESVLEGMAEYYSRNLAREVMKGMRETALQCKHTGGKPPLGYDVAEDKTYIVNEQEAQAVRLIFEMYASGKGYSDIMYALNKEGYRTQTGRPFGKNSIHDILRNEKYRGVFIFNRTERKINGKRNHHRNKDDSEIIRIEGGMPRIIDDETWERVQERMSKNKKGANSAKENYLLAGLIYCGKCGGAMTGNRHRCGRNKTLYVTYECSTRKRTKECDMKAINKDYIENLVIEHLEKNVFAPEAIERLVAKISEYAASQVEEINRDIKTFTDQLAGIQTEINNIVNAIAAGMFHPSMKEKMDELETKKANLLLKLEEAKFVFCK

SEQ ID NO: 912 - protein, 542 aa, synthetic construct
MLRRATQNLITALYPRLSHEDELQGESNSISNQKRILETYAKQNGFTNLRWYTDDGFSGANFDRPGFQAMLADIEAGKVGTVIVKDMSRLGRNYLQVGFYTEMLFPQKGVRFIAVNDNVDSENGGMDNDFTPLRNLFNEWLVRDTSKKIKAVKRAKGMSGKPVTSKPVYGYLMDEDENYIMDEETAPVVQKIYQLCLAGNGPTKIARMLTEQQIPTPGTLEYRRTGSTRRYHPGYECKWATNTVVHILENREYTGCLVNFKTEKPSYKTKHSVENPIEKQAIFPGHHEPIIDAETWERVQELRKQRKRPNRYDEVGLFSGMLFCADCGSVLYQQRYQTDKRKQDCYICGSYKKRTRDCTAHFIRTDLLTAGVLSNLRQVTEYAAKHESRFVKLLIQQNEIGGKRKTAAATKQLEQVQERISEISRIIKRLYEDNVSGKISDERFMELSADYEQEQRELKDRAAGLQEELDKSQAATVNAEKFMGIVRKYLAFEELTPTLLREMIEKIVVHESESLDGKRRGKLRRQEIEIYYSFVGKIDLPE

SEQ ID NO: 913 - protein, 547 aa, synthetic construct
MNYDCSNYGATLKDYKPDEIAKYIRLSLADEIKASDESESVTNQRRLMNEFIARNGNVGEKCREFVDDGVSGTNFDRPGWKELQEAMENGTIKVVITKSLSRLGRSNFECSYYLDCYFPDNNIRYIAIQEQIDTGNSENSNNEYAALNNFINEKYSRDLSKNIRRVYKIKQFAGEYMGGKPVFGYIKDPNDKHKLIIDEDAADIVRRVFSLYLELQSQSAVMKKLSEEKIPIPEVYKKTRRGLKAQFPYEWNYHTIRNMLRNRMYIGDMVQNVHTKKSFREKKIVKTNEEDWIIVEGTHEPIIDKDTFERVQNLLDANYRQPTPEYQRIFKGLMYCHECGHKIGVGNPKRDNRPIEKQYVYTYCNFYRKNSAYNKCTPHTMNYNNLEEQLMDIISNVCKKYIDLVGYEDIVEKRKKTLSTYTDTLEKKIGKLEIDIKSIDLKIEKLYMDRLDDIISPDTYKKLTDKFEEQKQKKQNEIDELKLTVEEYKEKNSVEDLLETQKIVKEYLKTRKNPPRELILKIVDRIEIHQDKTVDLYFKLKQLNQVV

SEQ ID NO: 914 - protein, 527 aa, synthetic construct; identical to SEQ ID NO: 56

SEQ ID NO: 915 - protein, 572 aa, synthetic construct
MTNEENCAIMKSTNPVQTVAPEKEDISMVRATEKITALYCRLSQEDSLDGESNSISNQKRILSSYAHDHHMANPVFFVDDGYSGTDYDRPGFQSMLDEIEAGRVETVLTKDLSRLGRNSTMTGMFINITFAKHNVRYIAINDNFDTLNPNSVDNDFAGIRMWFNEFYARDTSRKIRAVNKAKGERGEPTSSRPPYGYKKSPEDHNIWIVDDEAAQVVKHIFDLCMEGRGPGQIATQLRNERVLTITAYLEKEGRKSTRPAPEDPYLWSAKSVAQILEQREYTGCTVNFKTYTNSIWDKKTRQTPIDKQLVFYNTHPAIIEQEVFDKVQEIRSQRHRRCKTGKSHMFSGLLFCADCKAKMRYCTTNYFEKRQDHFVCATYRKNREACSAHFIRAVVLEELVWEHMKQVIQYVTRFEAHFRAEMELRLRTENEEALRVMRKQLDKAEKRIQELDRLFMRLYEDNVSGKVSNERFDVMSRSYEDEQKTLKTAVERLRQEITSQEEQHQNLDQFVQRIKNYAGLDGLTAYAVHDLIKAIYVGAPDKTDGQRRQSIHICYDLVGFIPLDTLMEKETA

SEQ ID NO: 916 - protein, 547 aa, synthetic construct
MPIAVPYSRFSSGRQSYGSSLHRQEALIANWLAHHPEYTLYERKYEDLGVSGSSGKHIDAGELGELLAAIEDGQLPTGTAVLVEAMDRFSRLEPMDTLNHLRTIVKAGIEFVTLDDWQRYDAKSLKGNGLLYLALKAQTAHEFAVRLSEFAVGSYKRRAEKAKLNEPIKRRNPFWLTSEGKLKDDGSSDAIKQVFQAFANGVPLRALAIQYSQYFANRQSLKHALRNPAAIGYWQRTTTIEVDGGQKRVPGELIKGVFDPAVTEELFYQVQRMLDDLADQPVTVARKFPLAGLMECGDCGANMVLLRQNARQQTDAVRCYRRMQSTEKCTNQKTIPVPVIGWFYEATRKPHAFKAYQRTKLPENTRQRIKLEGQIEQLSKQQARLRKLVLLDENDESAVADYQQLVNEKKLREQELASLPLVTDSPVVGMPEFWRFMHSDPFAISNLLQQDGYRIICRNDGTLEIKESADDHPAESAQYVGYARKYRMWKVKPRGEDTMFVDSTGQIQFPQTVTITTSEQWQQRIEGTDLSAYMDGDDLADYLESQG

SEQ ID NO: 917 - protein, 545 aa, synthetic construct
MPEVLQQMLNYVIAIYIRLSAEDGDLSDEKSESNSVVNQRAYIRRFIELRPEFAGAQILEFCDDGYSGTNMERPAVRRLLEQVRQRKINCIIVKDMSRFGRDYIVVGDYLEQIFPFLDVRFIAINDSYDSKDHKYGSAGLIDVSFRNVIYDLYSKDLSEKVRSTKKQLAEKGYCVAPYAFFGYQKAPGNKHTLLVDEDAAAVVRRVFDLFTSGLSTTDIARKFNTEGVLTPLQRKRLQAVSRKWNCVDQNKNYWTSSMVRKILDDERYTGKAIYGKTTRKKVGSSRVKAVTENQWTVVDGAFPAIITQEVFDTAKSLNRSSHPGSAGESTRVFYRKIRCGHCGLAMERLQSAHPCYVCRTDRYKPDIGCPQDKIGEKELEQAVLASIRTMAQLVRGAVQAKQRQSAKDARHNQRLDRQIKAHQNSIQMRQQEKMAAFEDMVSGKVSSEDYQHKRGRCEKHIQRLEIKIKELEDAKRQAKGEELSAGSILPYTNVRTLTRELVDLLIQNIYIYSSTSIEIVWKCGDEYQRLLADTTKKEAAEHEQG

SEQ ID NO: 918 - protein, 513 aa, synthetic construct
MGTAALYARISQDREGAGLGVNRQLEDARKLAELKGFTDWLEFTDDDISAYAGRIRPGYEELKQAIREGRVEAVIVWHADRLHRRVSELIEYAELCTEGRAVPTYSVQGGDLDLSSSTGRMVATILGAVSEQESAHKGERISRKRRQAAERGIWQGGPRPFGWSIEKDTDEHGRSINVPVIKEEEAELVRWAHEAVLEGRSISSVVLHFQRSGVLSSHGNGWRHSTVRTLLHRSRNAGLESLKGEIVGPSSFPALVSEATWREVVRILKQPERRKSDTTQVSSLLSGLMHCHCGELLVTGSSGKRRKDGTLTRNYVCISQRFPDSRRRDIQHVGMAADPLDDFVSKIMPQYIAIPFGAFRLFSPARKVDLAETERELAGLQARQEEAAQMWADGEITRRQLATMNSSLEEKAAAAEATLAELTTQGQALPDLAPNQAQEFWDQLDLLGKRAVIRQTVGIVVFPTGGRQFKRMSVDEQEDHLRIVARPVSETSGVRVAYWQPTVPPVWPEDEEE

SEQ ID NO: 919 - protein, 510 aa, synthetic construct; identical to SEQ ID NO: 67

SEQ ID NO: 920 - protein, 671 aa, synthetic construct
MKRKARIQTGIDDRLVAIYARKSRITNKGDSIGVQFKQSADYAINQLSLPEDYEFARYEDKGLSGYYSDRPDFQRLLRDIEMGKIKAVACYKLDRISRKTSDLMRLLEYFERHDVTLLVCSNNINTRISTSKIIIQVLAIIAEFERDILTERIQDNLMELAKDGRWLGGKTPTGFSSQRVTTGSGKNKSAISFLVPVQEEKEIVLEIYGTFWETRSLLQTANIINEKYETKHGAKFTTSTIRLILRNPIYCVADEYSYNYFLEHDGNLFGEPSDFDGQHGLTAYNKTDQMKVEDEDSTFFNPKFSQLLTRKPISEWIVSVGRHEGFISSRKWVETQNMLDEIAEKYNRPHRKTNALLSGLMYCPICGKRLRVLPESNRWTNGKPRFKYACPGVRAKECTFKGVEGVTLDEFVIHSLSSLQEEHSDYYRQLLENRVASMIRTDQSEKEYQETKKAIERLNADIAAQVRNLREADDALKRFIQDDIKELTDELAKREAALRRMEDTQSENQYLIHELNGMKKRLLSFEEFAKGAQPEALFTLVHSIVDRIYITTDGTKQKCQVYIKGCATEDYSDVLGAAGYIEEEPLLPVASYVPPMCDLDYYSISYSGFSSINYLKDVCFCRLLVVICLHKRIGAIPQSLKLFALILNALDLCSHPTFNYTDLFIIVLVST

SEQ ID NO: 921 - protein, 506 aa, synthetic construct
MSTVTNCLLYARISEDPREQERGVRRQVHDLRAFAQLRGWQVVDVFTDNDISAYNGDERPGYESLIARIAEGGIDVVVGLHPSRLWRRRVERALAIDTFHLHGLKVAFETGGFFDCTKAVERSQLATVGESDTLESEVKAERVAREALARAEEGRANGAVSYGWCRVYEYDRTGRVTGFRDDVDSEQADIVREVINRLLTGDTLNKVTQDLNLRGVLPPGANIVMKRKKRAQGNEDGSKWNKTSVKKLALRPANGGYRQHRGQLYPAAWPALVDEEKWRQVVALLTAPERSVKRDGQRKHLLSWGIGECGVCGAVLKVAKRGNRKRGHLTLLYVCDAPKSCIGRSEAYVDAWVGAVVVARLARPDAVEVFGPDEDRLGRLRASVAGMRKRLDDAADDYAEGLLTRDQLRKVSAKLKQQIAGVEEEIKRSTPTLDLGAMGNLLSVPLEVAEAAWEALDVVQKRKVLEVLNVRVRIQPTGRRGPGFNPDYVEVLAGDGTPFAEYAPAA

SEQ ID NO: 922 - protein, 588 aa, synthetic construct
MKTVAIYSRKSKFTGKGESIENQVQMCTEYIKQRLNKDTEILIYEDEGFSGGTTNRPKFKEMIKDIKSKKIHILICYRLDRISRNVADFSNTLEILQENNCSFISIREQFDTSTPMGRAMIYIASVFAQLERETIAERVRDNMLELAKNGRWTGGKIPLGFTSERVKYTDDTGLQREYSKLKINKEEIKFVEFLYKKYLELGSLHKLEVYITQNELKSRNGIMFEKSSLKLILQNPIYVKANYEVINYLKENNWTIYGEIDNKHSLLSYNKTEQSFKNGKHTKVKKSENERFVAISNIEGFINPDLWLNVQRQFDKNRTRFPRLGKTHNALLVGKLRCGKCKEYMLVQHGRVSKTTGKKLFYYTCSLKRKSHKKLCDNGNAKADYVENLVINSLKLLSKSKKKFINGLKILYKNKLKSNETSIERLSLEKSLNEKKNQIDNLVLALSKSSEIEDILLDKIKSLKNDCVEIENKIKNIETSTKEQKLNNINLSLIESIIDECSMIDQLSRNEQKRIIDILIDTIYWYGSGNGKGKIKIKFIGADENTKEIVLSEEKLQQRMLQFYSPSTCKINDSFYLKLLVNFLFPLL

SEQ ID NO: 923 - protein, 511 aa, synthetic construct
MHHHTLSDLYLRLSLDRDGKTAIERQEADCRAWAERHGLTVRKVHIDRGRSGFKDVERKGFDSALAAVTAGVVGTLIVWKLDRLSRKGIGQVGKVLDDIEKAGGRLVSVVDGLDTSNDSARMVVATLAELARSESKNLGTRVAHAKRHLRRQGQWIGGQPPYGLLVDPTTKKLTHDPDTAVYARLIADDALAGKSLVQIARLLNEYDIPSARGGQWNAASIMNLVKSPAFAGLMPETETIEAEDGSRKFTSRVFPYRDPETLDTVSIGEGIITVGERERIIRQLESRTRVHAGKRMPKPNGTALLTSLVFCDVPGCGRRMHKVGNSYQCMARRAGNQCPGASAMADRVDEYVSERFLSMLPALELDDPMLVAIADRWVKRADPETFAKRGAIADEIADQEARLADLEDARYVRGEFDRPGALDRYDRLAARLQSRIDGLRADLTALPLPAVDITPLLDGELLRAAWAAATQDQKRDRLSLAIDGVFISKGQRGKRFIPEQRVRIKWAEIKE

SEQ ID NO: 924 - protein, 582 aa, synthetic construct
MVALEKPQRFGVSYARFSHRKQAAGSTIERQEELLARFLQENPDITLHEQFSDKGVSGFRGKHAKDGALSRLLEAIKVGRLPTPLVLIIESVDRLSREPMMDAWDRFNTLLKAGVTVAVCDMRLEIDREALSKQSWKLHSLINAMERAHGESARKSTLITGGWNKSIKAAYARKSAIKGYVGPPWVTLDEETLRYVITEKNRPTVQTVRRIFDWAAEGATAHGIAKRLNEQQVPLFRAHVAKDHVRQGWYQGYITEILKNRQVLGEHRYRGGEVIEGYFEPIISPELFFRAQQNLVRRPGVAGRRGQTLSNLFTGLAFCTCGGHMEMTRNRSATENGPEPIKYLMCSNRKRRFGCEAVGMVNYPKLEEAVLSFLPNIPWADIVREESPDYPLPGIDDRIATVMLEIAELETTRSQARRMILKGEEFEAEFTPVLTEAIASLRQAEARLAELQVERAKVVSTWENRPGLIRTAQEFREKMNILSDAERFIARTRLSETLKQMVTKMVCDTVRKTVAVEWGGRYAQLVFMPIRKDPIVYGRWTRLFYPNDFPGEAERIDPKKEFTRLTHEIMEAGFSWDRFVEK

SEQ ID NO: 925 - protein, 482 aa, synthetic construct
MKYGAIYVRVSTDEQAKEGYSIEAQIKAIKEYARKNNIYTDETYIFKDEGISGRKAEKRPAFMEMIKIAKTKPKKFDVILVHKFDRFSRNREDSIVYKSLLRKEYNINVISISEPLDPDDKMSVILEAFLEAMAEYYSLNLSEEVKKGQLEKHSQGGLQTRPSFGYDVSNNKLVINEKEAEIVKFIFESYTINNIPMLIIARKLHELGIRNKNGNFFENRSLCYILNNPTYIGKLRYTPGRRNTYDFDDPNTILTNGSHEPIIDMDTWNATQTKLSKNNVFKKPRQRVDYSLKFWLKGLIRCKECNCTMVTCNRSKLRCNGYNKGKCTNHNTILIKEAENIIINQIKKDFSTQIIKNIVDNTKKEKTTNEYEIITGKIKDLSDKEKRIKESYIDGIDTLEEYKANKELLIKEKKRLEEQLNLIENSKNNNSRKKEIIENGKKVYEILEDKNIEIHKKYAAINKLINHIEYDKISDCLEIYYN

SEQ ID NO: 926 - protein, 540 aa, synthetic construct
MPLNLQDRPAISYARYSSQGQDNNDSLRRQAEIFAKAVVETGALATDIQLVDEAKSGFKGEHIKAGSLGAFIEQLETMIFTQRPVLFIEKWDRLGRQKNSITQDVLNKLLKHVDVYDCSDGQLVTQSTENDLGASIMLLVKIHAAWQYSKNLSDRIRAAKESQFKQSMKEGALVPHGGYPRWLVVKDKKATLIPERASSIKKVFELYLSGMTLGAISKYLNTNNHLHWNRAGEDSYGSWNSCKLSQLIRQPSLYGSHVSRTWKTNGERFEEYSGWNAGGIEIKNAYPAVVSEEMYNLAQSIREQTKTNMPFNKSKSRSSTRSDGRNIYPVSTCSMCGSNYVLKMNKRKGKSYPEFLCTNKKAGGKCDSSSLSYVLAEQMLLNLVFKDLNIKKLFEKKSADSKGEKLQAQLQALSIELKELQDRVKMNSLNNKRTSATILIAIDDLEQQIEELKKQRVTTNEDYKFLRKQWRDLCSAESHIRVRALRFMETIIDSIEITSIKRGTKLVRVHLQQDRVIMATSNGRLRQGEYHIHFIDGTFK

SEQ ID NO: 927 - protein, 438 aa, synthetic construct
MCVSTKAAIYVRQSVNHPEGIARSIQKCEALVKERGWTLVDTYADNAVSASKSRDSARWADLLRDAKAGKFEVIVGVDLDRLTRTIRDLVALQDSGAKVLTVNGEIDLTTAEGELRANLLTSFAQMEVRRKGERQKRANADRVMRRGLPVPGKRRYGFEPGNVVERPEEADRVRWMYAEVLDGGSIFGIAKAMGRAPVRIREILSNPSYAGYVVYDGERYDAAPEVARIVSRDDFEKVQAILSAPERKLSPGNQIKYLASGIARCGVCGARMVKQSQNYLCKANLHHPTIKREILDEVLCWSAFDYLQHVEPSSEPEELQEAVQALAEAQRKRGRVQELYEDESADTTSLRKRLAVLAREIDRLAVKVDELRVSTVAGDVVSRIREQLDSTLTDQEGADWWEQTWKDLPLADQREVLLNLDIRVYHGRGADRVKVQLP

SEQ ID NO: 928 - protein, 505 aa, synthetic construct
MPIAPEHLALAYTGPFNAYLYGRASVDPNKKGRSVASQLGAGRTLCHDNGWPIVAEFKDVDRSASRYAKRGRERFEEMIEGIEAGRCRILVAWEASRYYRDLEVYLRLRNACMAAGVLLCYNGAVYDLSKRGDRKLTAQDALQAEDEADGIRDRNLRTMRTNAAEGRPHGRLLYGYARRYDPDTGDLIEQYPHPKQSPIVAEIFERVAAGETEYSIIQDLQTRGDRVPGVKWQQYHLSNMLRNPSYMGHRVFQGKDIGPGNWKGIVEEDLFERVQRIVKNPARLTTKDWSVKHLLSGIGRCGECPTWPPLRMLNNRGIISYQCDENYDTVISEAKLDAYVEEAVIEYLGSKAAIAAFRSTDDEKRAEQARALHGRLTTQLKEARKAATTVREDGSLALSVDSLGAMESSLTPQIEKAKEQMEAFTAPPVLRGLIGRENVDELWDDMTIDQRRSVLRAVVNVRLFKARARGVTRIEPGRVQLTFLGEPGFIREWRRGREKSPVPAE

SEQ ID NO: 929 - protein, 538 aa, synthetic construct
MKTATALVRVSTSVQEHGHGLDRQDTDISAFLTANTDYKLERTIQAIGESAYSGVVHDDSSEFGAYLNNLESKRLTPPTALLISSLDRLTRLPFFEATELINRVLKLIPELIVCDTGKRYSLSGGQDLGSLMELSLKIQLAHEESLQKSKRLRAARLKRVDQIAKKEKVLNNRPFWIDWNGTDYVLNEYADTVRKMVELRLQGMGSVAIQAYLNERPEAYPCFMYRGTLRKWTKSRIDDILFKEKTITGTYVIKTTYTPDEKRAAKRDGVKLSAYNKDASHELKGLFPAIVDEVTYHKLKTGTGKGRVSNQYHNVLRSLGKCTCGSSFVLSYDSKVKTVEDRIYLKCNRRNQEGRLSECSNPSIKVYPLVRKILFQLLEQPLYVEDVNKVSKSDELQKQIEENEALLQRLQKRLELDLPESVLSDLVTRLKAVTDVTASLKLDYQTAIASESESVDTNTVLTNLRNLGLKTAEQRIEVNKALRSLLSEVVVNNETKRVLFKFKSGATRWFDYEKGGDVAEAYHFAFEQVSEADSDDFE

SEQ ID NO: 930 - protein, 498 aa, synthetic construct
MNKTKVYSYIRFSTSRQESGDSVRRQLEIARNYSEKVGGVYQDRSFTDMGISAFKQKERDGLQMMLDMVEDGSIEKGSHIVIERLDRLSRQGISVTQQLITQIVQTGVLLYVAGDNLLLDRNSLNDLSTVIIVAVAADLAYKESLQKSQRIKASKIAKKKDGLDGRVTKKVCPFWLTFDENKQGYVFNEKLPTIQRIIDLRQQGLGENKVAQHLNDENIKPPRAAKWNPTTLRKMYTHPALYGAWQTTEKADNGRYVDSDLIENYYPALLTYEEFSLMNPKSKTTTGKDSGLNPFKGLLRCAKCGATMSRQTTKMRSGEIYVAFRCTNAGKGIYCDAVGYRDLDKYLVSGCKRLKITKTADRDTRQQEADLRALESKLEQLQKAILTQTDISALINTSQLVERQIKELKSKIKPVATVTVEELYSHKDTPQSFNLLARSLLKRVEVEVKAKGRHTKTLFARFYQHNDYVITMTVLPSGESFYSTTELNELYKGTDNFD

SEQ ID NO: 931 - protein, 498 aa, synthetic construct
MVGARVSVLRGEQKVSHIAQKETGTKWVLDRGHEIVGTFEDLDVSASVSPFNRPDLGPWLTPEREHEWDVLVFSKIDRMFRSTRDCVRFAEWAEDHKKILVFAEDGMTLNYRDKDTSNSLESMMSELFIYIGSFFAQLELNRFKTRTMDSHRILRGMDRWAGGTAPLGYRVVDHPSGKGNALDTDPESKAVLHDIAGKLLDGWSIIRITQWLNDNHVLSNRDKARMAKGKEAKERPWAVSTVTRALTSLKTQGYKMHRQKPLLDGNGEMIRMAPPTFDDDTWRRIQETVALRQATKSRTNSSNPMLGIGYCDECGASLAQKILRKNGKEYRYYRCGRSPMQCSGVNYKADDADKLLEESFLARYGHRNVTRRVFVPGEDNSHELEQVRATIERLRRESDAGLVVTPEDEEIYLQRMRSLIDRRTTLESTPVRSAGWVTETLNTTYADAWGDQDHHKLLTDRGVKFYLSPGHPRMYVPELDEGQNEEASTNGAASADRM

SEQ ID NO: 932 - protein, 518 aa, synthetic construct
MEAEWTEADLALLEELTRAEALLPQNAPRALLSIRLSVLTDDTTSPVRQELDLRILARERGSRVVGVASDLNVSATKVPPWKRKELGEWLNNRSPEFDELLFWKLDRFVRRLSDLSTMIEWSLKRGKNLVSKNDSLDLTTTAGKIMVTIIGGIAEIEAANTSTRVASLWDYAKSQEDWIIGKPAYGYVTDEDDTGKVVLVIDPEAAKALHWARRMALRGRSAGFMVRCLKRSGLMTQGLTVATLHRRLRNPALLGYRVEEDKNGGQRRSKPLLGKDGRPIKVAPPLFTEEEFETLGAALDKRRKSQPPRRVGGATQFLGVLLCADCKTNMTVQITNNTHGTYQYLRCRNCKSGGLGAPNPERVYERLVQDVLKVLGDFPVQVRQYAEGAEARKEIKRLQETIALYMKDLEPGGRYTKTRFTKEQAEATLDKLISELEAINPETAKDRWVNVHGGKTFREHWQEGGMEAMSADLYRVGIRCEVTRTKVPKVRAPKVHLRLLIPKDVRERLVIREDDFAQ

SEQ ID NO: 933 - protein, 517 aa, synthetic construct
MSHMTLRDPLGRVRAIIYVRLSSHRGDIDPSTSPARQEEVCRAYCLAKGWEVHPHVVRDLDVSGSDKGLRLDRPGLREIRERWPDVDVVIFAKLDRLARNVIDFRAFADEAAENGAALVSVAESLDLTTTSGRFVATILAAFAEMEAATIAERTTAGIEKARELGRWAGGAAPYGFQVVPAPDGPGFVLAPEPEAAAVVREAAERVLAGESLYAISKDFNARGVPTRSAKLIAEGRTKREKAAPWATQTLSQVLTNPATVGRSVYRGELIRDDRGMPRQLWAPLLPLEAWHRLRAVLAVNGEAAEGRGRRVRAARLLSGIAYCAGCGRKLYASSRKHPSGNTVPTYACAARRNGQGCEGVAITAEMTEEAVTRQFLARVGAWSVVEAVTVTVDDGRRADVEAGIADLARQMTERGANVAALAARLAELHAAREALPATAATEVRRVETGRTFGEEWAARDTDGRRALLASCGARAVIHRAAVRGRKLFDESRIDLRLGEFDDPEAQRLAEIAAEEAS

SEQ ID NO: 934 - protein, 525 aa, synthetic construct
MGQNQQEQTTGSSSPLRAVVYVRISDDPESTERGVDRQEADCRAYATAHGWEVAAVFRENDTSAFKQRTITLASGERVRRVVRPEFRAMLKHLNDGQAQVMVAYDLDRAVRDPRDLEDLIDAKVLAGFTVRSVTGSLRLDTDSDVAMARVLVAMANKSSADTARRVARAAKQQAIEGTWHGGRVPFGYRAESGALVVDPVAGPMVDEAAQRVLAGESLYRIRKDWNERGVLTTHGCAWSDKTIRMVLRSPSIKGVREYRPILPDGTRAKTSQMQVQAAWPAILDEDTWQQVSDVLDARKQARNFHQPGSGATKRMYPFSGLIRCSACGRAMLHRGEVYQCVQATRGGCHRSIRSADISKLVEEAVLATFEQITVSPSKRATPSADAGARVGLAARLDADRERLGRLDDDHYDGLIDKAMWVRQRARIAERIEATRREYAAAMPEQEGPGIDVTTVAKEWAGRTPLWQYQATSLILEAVLVHALPEGMNGATPARRRNETIEAFHARRTVYRADILSRRVELVWRA

SEQ ID NO: 935 - protein, 552 aa, synthetic construct
MRYRDEDWLEMETDNTAGGRPRKAYSYIRFSTPEQGKGDSFRRQHELAKRYAQQHGLELDETLTFHDVGRSGYRGANYKAGRLAVFLEAVTAGHVEPGSVLLVEQLDRISRMDPLDAIDVLRDIVRHGVTVVTISDGREYTRESLKKDFTSLIMAVVLFMRANEESRTKSERGSAAWGNKMAQIGSKPLTSMTPAWIALDDATGKLELIEERAAVVRRIFEMAIGGTGVEAIANTFNAEGVDTWGRGKRKAKMWHRSYIARILKNPAAIGEITLHRTAHDEEGVMSRVPQETVRDYYPPVVSEEIFREANAAKAARGDRVRAPRALFPTQNLLAGLTACPKCGGSMVRVMKGKRSYPSLVCSMAKAGKACEYRSVRYALIEERLLRDLPARLRQREGLDATDGDLAVRIAETEDRLSHVSDDIGRLVDDLAAEDDENVRRILRQKLRQLAEARKDQSEELERLRKLNVAADHTIIAARVDRAIEALNKTNGEIDRAAANQALRTLFSRVIVNSPDGTLDFEWKAGGLCRITYAILFDVQASSNHESNSEQAS

SEQ ID NO: 936 - protein, 473 aa, synthetic construct
MTARTAALYCRISRDKAGAGLGVERQEEDCKRLAAQLGWAVGGIYIDNDVSASSGRRRPEYERMLADIDRGAVDAVISWHPDRLHRRPAELEQFITLCDQHAVEIRTVQAGAMDLSTPSGRLVARMLGAAARHEIEHKSERIRRARVQLAQQGKYGGGRRAFGWESDGLTQRADEAELIRYAASQVLAGVSLRQVVGEFNRRQIPTASGSGRWVGAKLRSILLSPRNAGLAALNGEILGEATWEPIIDRDKFYALQAILNDPDRRWPRGGSAAAWLGSGIYRCGVCGSNSLRVNPTASGRRRYRCYAPRADGDRTRHVGRDQERVDEFVTRVLLARLSMEDAAPLFAAPDRGGVDTNALAGELSQLEDRLNDLADLYGRGGITAAQLESGTASIRQRQDEVTAALAAAAETNPVAALAGADDIEERWRSLSLGVQREILKSLVTVTILPTKPGRKGDGGYFDYDAIHFEWRTR

SEQ ID NO: 937 - protein, 544 aa, synthetic construct
MKTAYSYIRFSSSRQADGDSIRRQTELARSYADKNGLDLQDVSISDFGVSAFRGSNATEGALGAFLRLVDEQKIDSDCHLLVESFDRLSRQAVEDALALLMQVVNRGITLVTLSDSHEYKRGELDMTKLILSIVTMSRANEESEMKSQRTSAAWNKARLDAIEGKKAKNSRLPDWLSWNDDKTDFVVNQSAKEIIQRVFELSAGGSGIEIIARTLNDEGCRTFKKSKEWRSSGVSKLLRNRAVIGEFQFYKKDTQGKRSPIGEPIVDYYPRVITKPLFLAVQQGMDLRNKRGSGNRSGQFTNLFTGLIRCGECGAAVVTSSQTSKTPQGYLKCTLRCESQARMNYKYTEPQVLSALSSLQSVIEKYRSPISDETASLELDIRALSDKLSSLESLLDNAFTPRIAERLQEAELQLADAKALLSAEQLRVSSQQNREQIVLGLEPLESISDRRAFNSKLRTVIDRIEMIEHPHRKGSALVYFISDRPVMEQHFTKLKGAHGSGSEAYELHVDDVPTYLGRTSSKKPLEFIIDETEDILSFMPTQLV

SEQ ID NO: 938 - protein, 506 aa, synthetic construct
MRSVITYLRYSSAIQGAEGADSTRRQNDLFKQWLKKNGDAQIVASFSDEGLSGYKGKHLTGQFGDMLARIEAGEFPEGTILLVESIDRIGRLEHLETEALMNRILGNGIEIHTLQDGLIYTKDALADDLGISIIQRVKAYIAHQESKQKSFRVSQKWGHRAKLALAGEQRLTKMVPGWIDPETLKLNEHAETVRLIFKLLLDGESLHNIARHLQSNGIRSFSRRKDANGFSVHSVRTILRSETTIGTLPASQRNDRPAIPNYYEAAIDASTFNKAQEILTKNRKGRTPASDNPLSLNLFKGLFKCRCGASVHPTGTKNKYQGVYRCNNHLDGRCDVPPLKRKPFDRWMIDNFLGMIDMGNDGESERKIAALQHEVEIVTSRIKKATALLFEMDDITELKTQVKELNQKRTALQTTIDSMKRKALLTDKKLPQIRDVDLTTKAGRVECQLILSKHLESLTLDEGFVTVKLQNGTKIIIPTDPLPLNDGTSIFEIADKKLLDIDVYRL

SEQ ID NO: 939 - protein, 558 aa, synthetic construct
MKRVIGYIRVSTDNQDLERQRVLIRKYCENKGYSLLRIEEDYAISGTVSNRNGLNSILNITNSVADMVVVSELSRLSRQDDIFETLTQIHTIIRNVDLVILDEPDKVYEAGKTIILSDFLMLAIKAYGAADERKKIVSRMTTGKDSKVQAFPLMLTDSNIPTGFKAVPNPNYIKGATPKMLLVEDEERMQLVRDIFNYVANGLSLGKTAEKLNMLGYRTARNKPFYEQSVRTIINDSIYNGVRYWKGMKLELPVKFISDEIWNLAHKKVQENKNYSGEAQKHYNPLKGIIKCPCGQTSMYGRTSSCITYRCLDRIKMGIKSPCTNVGIKAETLIYAVWKDVRLRTLDETYQAKSNEKIAEIEAENIKLTQSIKEKDSEIAKLQSDLKTVIDNVMASTNITIVKALNGKADSIDSQIKSIEAEKKAIDEEIASNNRRIADEIKSQSRKELDSLSLEGKGEMFRELLSKVVYYSVSLNSGFIVITYKNDLETIIAYHNRNKPFLWALPITFRFNKVKRTVIVPTLPEQPKMTSFVLERIKEKEYTFKQLQESFNLEEYKI

SEQ ID NO: 940 - protein, 486 aa, synthetic construct
MIIMRTAVYVRVSTEEQAKEGYSIRAQTERLKAYCLSQGWEIVDFYIDDGQSAKDMERTNLKRMIQHIEQGLIECVLVYKLDRLTRSVLDLYKLLEIFDAHGCKFKSATEVYDTTTAMGRMFITIVAALAQWERENLSERVRMGMEQKAREGQWVINMAPFGYELDKKNKSLIINDKEAAIVTRIFNMYLSGKGMKKIATELNAVNIPTKTGKTWSDNKIGYILKNPTYVGTIRYNYRVHNDQYFEVENAVPAIIDRVTFEKVQSVATARKKVHPKAATSEFIFSGTIKCAKCGAPFSGKYGYSKRGEKIHRPRSYYCSKQILGLCTQRNISERFIEHHFLKYLQDIEIDQDQIKNVEPTNEQKDIQQQIMLLEKDLRAIEQRRKKWQYAWVNNMIDDDDFAARMEEENQTEVKIQEELNNIQPVANSMDPVEFKTILKDIRTNWNSLTAIEKKMMLQMLVKKMVVDKISPKPKVDSVEIVEIEFN

SEQ ID NO: 941 - protein, 468 aa, synthetic construct
MTTKHRAALYARQSITRDGSASLDVQIEACREAAKRLKVDVVVELVEPPSTSGYRNRGRSRPKFGELLELIRAGEVDCVIAYKTDRLSRGGGPGWAPLVDAFETAGRDPDKAVATTDGWVSEFEIGIRSAMDREESKKTSDRMLAVRAREAREGVPRIAGRRAYGWNYNMTEHVPEEVARIHEAAKRILAAESVWSICTDWNIQGVPTVTGRPWTVTTITSILTSGRIAGLREHKGVVVAKGQWEPIITEEQHQALVVALAPKQAKPRKGRTYPLTSLMRCGLCGGRMRSLQREGGRRTYACRNGPGLDGCGRVSIRAPQLEDYVRDLICGMLADPVTRAAMARLDTGDEDEGDGSLLESLRDIDERRQRLIDLYTDGDIDRASFRTHKDRLDDEAREVEAQIANRTGTRVLAEVPGTYEELVDAWEERGIDFQRRLIEALLHPIVVNPARSRKRAFDPGRLEVEPRA

SEQ ID NO: 942 - protein, 458 aa, synthetic construct
MKEKIPRCAIYDRVSTDLQVKEGLSLEAQRQALTDYAISHGYKIIGYYADEGITARKKMQNRKELVRLLNDVKADKIDLILVTKLDRWFRNVKDYHNTQAILEAHGCNWKTIFEEYDTSTSNGRFAINIMLSVNENECDRDSDRIKSVFEYKKSRKEHLNGRPGYGYIADENKKLIKDPATQHIVEDTFKHYFSTYSKNATVEYILDKYSGDPNAPTMYQVNRILTCETYAGRKYGIDNYCEPYITLKKHEQIISVCDAKIIPHQNEPFLFSSMIKCPICGRNMSGFTKKHTLKNGEISKYKRYRCEAKFTEFHNGACITESVIESYLLNNIMCELNKELLQIKTREKENKKKLACNPVKIQEEINRLNIMYQKGRIDDEYYDKQYSKLKQKLSDAQHPQKVASLEAYKPIIQTLNDGWMEMYHTLDIKHKKSFWKGLIEAIYVDKESRKLCGFKFLL

SEQ ID NO: 943 - protein, 507 aa, synthetic construct
MEANTATRPSDTAALIYTRASMDRHYLMRSTDDQETDCRSWCDQQGWKVARVITDANRSASQWRTREREGFEEALQLIASRQYAAFVTWEPSRAGRELAAYIQLRAACQAAGVLYLTKGRVYDFARSDDAFMMGLEFLTAEKDAAVIRERQLRTVRLNAQKGRPHGRLPYGYRRVYDPSTGALLRQEIDPEKAAIITSAVDEILHGVPVNRIVTRLNREGVPTPMKPLSDKSRGWMNATLVQIIRSPTVAGLRKYQGEVIGEADWPAIIPVETWEKVNRVLADKARRTRYVEEDNHSHPKWLLSFVARCGFCGRFLARVLNVIPRKNGKLRNNYVCQHIGCRRISIDVERTDAYVLEALLSWLSTPESLAVLAGPDDNWSDRVREAEEQAATLRDRLDEAAEQYAEGKISLAMLANVEQRLTPQIEQAAREAVPPVADEAVLDLINANDIRAAWDLLDLLEQRRLLKMLLDIRIEKSRLMGGVFDYERIKIAPRFVTPETYQWRRLA

SEQ ID NO: 944 - protein, 497 aa, synthetic construct
MTISRAVIYARVSKAGRDGTSKSVDEQLTDCRAECARQGWPVGEEVEDRERGASEWSPGERPGFRRLFQVLRRGDVLVVWELSRLARNDEDRTALAAFCKQLEIPWHYAGRTYNADDPDDAFNLDINHAVSKKESAQTRKRVLRALSANAADGKWHGRTIYGYRGVRDPDTGKIVRRVPDEVTAPIVKEAAERVLTGESLRSIGLDFQSRGLLTANGSERWHGYTIRNMVMNPAYAGFRVHKGSLTQGNWEPILTEDEHVRLKAVLTDPVRTAHIPRGTPPRYLLSGIAKCGVCGIPLYKSANHGRPIYKCSGRPSHMARELSKVDAVVVQRILQAIEHYRIELVFVTAEHDDDDQPIDPAVQAVGEHLTEARELQQRLDAVYDQVAEGKVSATALARIEARLLPQIKTATDAAESAARVSDPAARILNTPAEDLWASWTLDEQREFIRSAADIVMLPAEGRTFDPDRIQITMHKNLRTQPEGFEHYGPLGDDDAPG

SEQ ID NO: 945 - protein, 455 aa, synthetic construct
MVEVIGYVRQSTLKQQSLATQKSLIIETARQYGWYNVTFYDDKRSGRHTKRSGYQRMVEAIRSGKCKVLCCYRLNRFHRNLKNAIQLFEICKTHRITIISVNDGYFNLAKEFDCFRFNILMSLAEMESNNISEQTKNGIREKAKQGKLITTHAPFGYRYRKGDFVVQEEEAYTVKSVYRWYLQGLGYKKISQYLDNHPKLIPRKPYQVRNILLNPNYCGRVINKYGTFNDIVPPIIDIDTFEEAQERRIHKQHNRSNSRNKLKRRIKCPYCQSTLTNLTIKKRNHSLRYYVCPKNMNDAYYTCSFKGMNAQTIEAEILDTCKSYFKEQAHHSHLNERIIETLERQKMKHKQTQITQEELIEKLPQNHIDVETFKQLSTSNESETHCSSPTYLPNQMTKSISHITKDKLILEDIAPLIDDITITQTKQLQGIYLKHSPINMVEQSHLIPHERNENL

SEQ ID NO: 946 - protein, 573 aa, synthetic construct
MAKAYSYVRISSKVQAKRDGVRRQLEVSRAYAEKAGLTLDEELTDIGLSAYHGKHKAIGALGGFLDLVKTGKIEPGSVLIVESLDRLSREDVLTAQSQLLGILSADIDVATLIDNQRYSKGNDYTQLIISLTIMARAYDESKTKSERLKAAAAKRKTDILAGQKRYVTNPPMWLTNFQTDGQWDCVVNGFGSVVKEMFELYDSGLGGHSIARLFNERGVPTFKSATSEVETKGVWYSPTIMNLLKHEAAIGTYRAGDQVAENYFPAVVDRDLFYRVQDRLKSQNNVRRGRKGDSYTNLLQGLAVCHHCGHAIRLNRGGVKNKVLYLSCQTRFIGSNCDSEGRKFLPYQAFEDAILRLVMDYYIDQSKGGNKPKDSIASDLTSHRQTRADMARRIANIRAVIETAEDDDDRISFMTRLNDLRKDTASVDAKIEALERQLRDFDETDKAEKNIHDEIRSEVSKWSSMSKEELFVSRSKIARNLRRVITTVQVDVPGEQVIVVVGGFIRWWIIGVDGTVRTTGDWSALPFDILVARSKEFFGDRIDVGAMRAVYDRIDLPRADPALWDNERAARGL

SEQ ID NO: 947 - protein, 518 aa, synthetic construct
MVTHLKNLDIAIYLRKSRKDIETEREAALRGEEYDTLTKHRKELLAFARKNEHNIVDIFEEVVSGEYIAERPEMQALLQKVKDLNYDGILVMDLDRFGRGDKMDQGRIERTFKESQTLILTPQETLDLNEESGEFTVEVKTFLARMEYKQIKKRLQGGRRRGATSGRDQSTKPPYGYRKDDSLRLVVQEEEAKVVRMIFQWCVEDGLGRSAIAQRLMDFGIPSPTGLPQWQHVTVGRILKNPKYKGDQVFGRTKWSKNEDGTYSYTKVHDIEQMAYLEGAHEPIVDPELWEKAQEALSRRREAPVKKNHDILNPFAGILKCKKCGKAMLANKPTNRPNKYLSCYTTRCDTKMIALYKVEEVFLRQLETIFDHLRATAKKRRSQPDDAALDLAKRKVLRIQEDIKKTNLRKTNLHDLLEDGTYDKDTFLERSRLLQEQLKQLDNELEAAEKQVELEAGRLNQALKVLPMIKKALTEYKSAGSIKEQNALLKEIVREIKYRRDTDWTGPYQFEIEIHLYD

SEQ ID NO: 948 - protein, 499 aa, synthetic construct
MKEVGTSESIINQKEFLTKYVTKQPNWLLIDIYIDDGFTGTNFNRPSFIRLKEDIEQGKIDMVITKDLSRLGRDYIDTGYYLEKYFPTKNVRYIAVNDGIDTYSKNSNNDIGPFMSVVNDMYAKDISKKVRTVKRTKAEKGEFIGAFAPYGYKKNPNDITKLVIDEEAAEIVKYIFNEYVNGNGLAYIAHRLNERKIPCPSVYKQQSCNYHCKTISGLWGHNTIKKILTNKVYTGDLIQRQGEMVSYKVKKYRLLPKSEHLIKEKAHEPIIDNQTYELAQDILKRKAHNIHKKENSEHLLAGLLYCPRCHNKYTYQVQSGLKNDMVAICSMYNRYGKDYCARIAVRESILNKFVVQDLRKILQEKIDKEKLINSIDKTKINNDKKMLQKKVADNNRRIGEIAKIIKTAYEDRVNGLLDTEEFVSFTESYKKEKQELIGKTEKLNIKLSDFENNKENELMKYIKEIVSFKDINRNIILNLIDSIEIINKENIKINYKFTV

SEQ ID NO: 949 - protein, 402 aa, synthetic construct
MGKIALYTRVSSARQAADDAYSLDVQKERCIFLLKSKGYNDADIDFYCDAGISGTTILERDQLKELLDKLEKGQYDGICCYDLSRISRSISHTLQIFKLLKENNLRLYTCDGAFNGDINGQNAKIMVSIYSMLNELFIDQLRERVIDGMSKSVEAGNYFGGPPPYGYKYEYYSVKQENNFQENQNSKTKKRDIKKRLIVNEEEKPIVELIFTLFVREKYSIKNVAQHLNLHGYKTRAGKQFATATVQKILENPVYCSRLFWAKRRQKKKTEEGVRVWEKKTIFDVNFYDLPLGNHQAIIPEDVFLEALERLRSRRKVRVNENTADAMRGITKQQFDDANKKMFINILRCPGCGGRMTSSLQHLNWPMEKEVKQKYIINAIVLMRVGTTAMAIIQYKKSERLI

SEQ ID NO: 950 - protein, 537 aa, synthetic construct
MTDLPPIRSNTKPAYIYARFSSAEQAKGYSLERQLSTARSYIESKGWQFADQMTDEGRSAFHGSNRDEGAALFEFEAKARAGHFKNGCILVVENIDRLSRQGPKAAAQLIWALNENGVDVATYHDDQLYRADASDMLEIFGLIIKASVAHDESEKKSKRAKASWDKKYEGIAAGSKKAITQNVPAWLVVTPEKDIIEDKRRVAVVREIFNAYVEGIGLHTIMKRLNERGEPAFSGKATSKGWSKSAINHVLSNRSVLGEFATQQGKHIPVVYYPQIITLDLFNQAEAMRATKSKTGGSSKSQGNNLFAGIARCEHCEGPMGFIRDGGVSRYTTASGEKKVYKSKGHSYLICDAARRGFGCDNKAHTPYRVIEAATLQQLLWATVEEQPDTSNPKADAIRSNLDAALHNIDLKHRQIGNIIDSMAEAPSKAMAARVAALETEIETLQAECATLQKELAIESSAPSTFDDLAELRDLTELLESEDEDIRRAARLRTNASLKRVLDHMTVDRTGKFVVMSMDVGVWEFDRTGQRIGGQAL

SEQ ID NO: 951 - protein, 462 aa, synthetic construct
MDFFIYTRISSDRSGEGAGVQRQKAECLELAKANDLNVLEVFTDNDISAHSGVPRPAFNEMIRRLEAGEGDGIIVWHLDRLYRRNRDLELIVNIVESRKIEIKTVTAGEIDLNTSSGLLMARVIGSMANYEVDHQRERIKASHVDRAKRGTWRGGPIPLGFRSGGKGTLVIDEEEAKDVRFILDSILNGDSLHLISRRMNEPHRVKRRNGARWTNTAVRHLVKSPALGGLSKVSEGEYVPAQWEGIVPPEKWFAVQAILSDPARRTNQGTERRWQGSGVYLCGVCGKALRAKISNGVNYYTCIACHKVSRNQQKLDGLVDDLLIAYLSVPENRLPLVVKQESTTDLNELLSVQAGLIERRNQLGGLFAQGVISSGQLTRGNAEFEKQLKAIERKIDDARESSPVLEMLLSSDDLRERWGSMSADKRAEAIRRLVEVRVNPAGRGTKIFDPSKVEFTWKLCCG

SEQ ID NO: 952 - protein, 461 aa, synthetic construct
MRVAIYVRVSTQEQAKEGFSIPGQLESLRAFCKSQSWDIVEEYKEEGRSAKDLDRPKMQEMMRDIKKNKIDLVLVYKLDRLTRSVLDLYQLLNYFDEYEVKFRSATEVYDTTTAMGRLFITLVAALAQWERENLAERVKFGIHQMIDEGKRPGGHSPYGYKFKKNFDCEIIEEEAKWVIKIFEWYADGFGYRKISDRLNELNIKPRIAEKWNHNTVYGMLRNDIYIGVYRWGDKVIYNNHPAIVSNSLFVKVQKKLKSNHKNLARKGKFPLTGILQCGHCSEPMSGIFDARDKKTYYRCFGCNRSTDGKKITNLLLDEIEKLITSKDYFLSQVDKNYQPLTVNIDEIRKKLEKINQQKEKWYSLFLDEEDNPIPKETLYKKINELNQAEDDLKTILQEAEIDEETPEEKFEKLKNIKNIHLVYDEADAFEQKELLHAIFEELLLYRDKGRNKPITLKYKLN

SEQ ID NO: 953 - protein, 470 aa, synthetic construct
MAPKTRPRAGVIRCSIYCRISLDRKGEQVGVKTQLAACKKFATSMGWEVRDVYIDNDMSAREGAKQRPEYEALLKSQPEAVVVWHQDRLVRVPKDLERIIALGVNIHAIKAGHLDLSTPAGRAVARTLVAWSTYELEQKGERQRLANEARAVTGKPWWTRCPFGYNPDGTLNDIQAQALQQVYQDVLAGASVAGRARWLNDANFRTERGNTWTSTTLRQTLVNPRNAGIRTYLGEEVSKGAWEPIVEEETYRALVMILSRPARNIGGRGPIPDNLATGLAECGRCGGPVRAAFSRGKRGDLKAYPTYVCRLGQCVSHPRELVDRYLSARVVHYLSSAPGRAVWRQGEVGSDTARLRGEVVELRERLDAFAEDYAAGLISRSQMIKGSESVRRQLDDSEDRLAQAASSGALLGLAGDPAQVQARWDALMLDRQRAVLQALFPVIRLLPRGRGARTYDPVKSIHMPDPGDEE

SEQ ID NO: 954 - protein, 582 aa, synthetic construct
MRALTLFVSPVEAERLDTVRVAVYARQSKARPDSSEASPEAQVAAGETLAASRGWEVVHTFKDVGRSGWDPNAVRPAFEDLLSAVRAGEVDVVVVNELSRLTRKGAHDALEIDSEFKKYGVRFVSVLEPFLDTSNAIGVAIFALIAALAKQDSDIKAERLRGAKEEISAAGGRHSSSAPYGMRAVREKIDNLVVSVLEPDEDNPDHVAIVERMVEMSLAGVSDNKIATTLDSEDVPAPGEAARRATEKRMESIKKRRVAKGDSPIRWRAQTVRWILSHPAIGGFASERVKRGKAYVNVIARNEAGTPLTPHRGVVPGAQWLELQEKRSKRARTDRQPGGEATPTLLSGWRFTTCGICTGSMGQSKNNGGQDYYMCSNPKGHGGLSIKRKDADDYVAGRVWARLAGADMDDDKDREWVAEAALRFAMRRDLSGVQEEGRETAAHLEHVRNSLAELQADRKAGLYRGRDELAMWRATMTQYRAFEDQCTARLEELNEQTTAALQVPTEWSEPGEDPLGPGSPWAAWDVFERREFLGLFLSGISVGPGRDPETRKYIAIEDRLTLHWRQFGTEAQEEDEETLAAL

SEQ ID NO: 955 - protein, 536 aa, synthetic construct
MGGDSIQRQIASATAWSERNGIPLSDVVYRDLGISAFKKVDRPGLRQLTESIRAGIIRQGDYILLERLDRLSRKDLDIAQEEIKSILRMGVNVVAIEDNLELTPESVNDAQALIRIIILAENAHRQSREKSERIKAAYASARQRARDGKAVKRRLPCWLEVKEDTYTFHPVYLPIVQRIIELRHAGRGYSSIAKTLNAEGLPGRIGKSGSGTSKGWTGGSVREIVTSRALYGFYQPHITVEKERDDGTTKRVLQPDGDPIVDHYPPVIGYREWLAIQPTVTAKNRVPAGGYNKTDRLSGVARCAVCGGRVALRIYRRPSKKEGVKEYRHWVCVAGYSSGTCPVTRAFPDLDLMIIKSIGHLEVVSTPVPSTCSTSAVDSIRATIDANKERAEQLKSLLVDPEGGDVGFVYNALSTLQARIKELEAELEQLEKVEVDGCGNTTQEDIDRLAGYVDDVELFNHELRKIISAIRVQHFGKKGFRGVIEQVNGRRVGFVLTAPENPKRGHAKERIEFFARGLGIPEPDVELFPWETEQDD

SEQ ID NO: 956 - protein, 526 aa, synthetic construct
MRKYKCGDYLRLSKEDLLKKDESTSIESQRMIIESFCKYHNLELVSEYVDDGFSGGNFERPGFKKMIEDIESGKIDCILTKDFSRLGRELYQTGSFIEEYFNEKGIRYISINDGYDSLNGDSTISMKLTFNDFTLRDTSKKVKSAFTVRQKKGEYIGSIPKYGFLKDPTNHHNLIIDPIASLIVKRIFNMAYAGNSCYKIAAILTSEKVPIPIVYKHETRGALVTENDGYGIWRPQTIKSILTSEMYIGNMVQNTYNKIRYNSKKIRAVKKEDYIIVENTHEAIIDKEIFYKVNKMLKANSKTVEKNKERYLFSGLLKCKECGHNISILERKNKGNKSHYTQCNQYSKKGKYGICNIHRLNYNLLEEDLVSVITSISKSFLNEYDNKSLTNEANEILHEETNELQKQIDVFIKEISKYNNAIEQLYMDKVQGKIPENIFTNLLEKYNEDLNNATTRKNELEQDKIKMLAKIESLDYDACAEKIKKFLSSKHPTRAMIVELVDRVEIDNNKNINVFFRFQELSSYVR

SEQ ID NO: 957 - protein, 471 aa, synthetic construct
MRNIRIGKNTSNNKKTGLYIRVSTNFQFEEGYSVGAQTEKLEKYCNYQEIDNYDLYIDGGYSGSNLNRPEMKRLIKEIQEGKVESVVVVKLDRLSRSQKDTIYLLEDVFEANDVGFISLNENFDTTTPYGKAMVGILSVFAQYERENIRERTQMGITERIKTGKWRGTKPPFGYDYNNGDDVLVPNKDAETVRKIFELYKEGYSTYALAKMFDLKGDKQVSDMLSRVTYIGKLKYNKEIVDGLHEPIVDKKLFDEVQELRKTRTRATSHKSQYLLTGLIYCGLCGGAKMRYQKWSGGRVMIYCYSLDHSKPHLVKNPNCQNGKLDAAEVEEVVVSDMLKLSKEYEVIEEKSEQQNQKGFEAMNQRKSVLEGKLKSLYNLYASDTNNSVLLETIGEINKELENLNTQIEQYTLKNTRAKDMTARAKAFKSVADSWEFMSFNERQKTVREYIKKIKISNDYVEIEYNDLLTLQ

SEQ ID NO: 958 - protein, 426 aa, synthetic construct
MIAIYVRESTPRQYEKGFNFETQKEKSLQFLDLYDIDEEYKFYLEKGKSAWTTNRPVLKELMQDIVDGKITTLVIYKLDRLLRRHKGKEEILSLLEEYNVTLMSVSEKIDTSSSYGKLILNMMVSYSEWEEDVNSERTNDGLTMGAELGYFMNGGRCPFGWERYTVGNHKKIKVNRAEKEVIHKMAEYIHNGYSTYQVKMLINENEYLKSINKTFCENQIINILKDKKNVGIYEYKGKEYVLEGETIFTEAEYKQVQNDLAERSYTGRYSYLFDHKVRSIKGAKARLECSVKKDKVYLYYFDNQSKKRISESMVKKQFIKYMKESNLLYIQKRTKSRSADIRHIAALRRQLKNMYENMELTTEVYFEEMRKLDKEQRSADNYYKRYVQEFDIWFNSLDYDQQVKIIWQNIKCIEVDFETKELRFNS

SEQ ID NO: 959 - protein, 511 aa, synthetic construct
MCAYSVFNTFPVYPLSAKPLILLAFCRYRYHTSLFDRPGFNELLQDIKRGKINAVIVKDFSRFGRNSLEALELLEVVFPSLDVRFISIDDAYDSADPRCSKDRMIYIIKHLANEYYARVASKKLSQAHELNRGSGEFWGARPPYGFARSQKNSKILVRDDEAAVVLIRIFNMFVLEGYTYFRLAKQLNEERIPCPQAYYLIKHGKQDKVEKNPEKYLWTGNTISKIIQNPAYIGCLVTHKTEQSYYKNQKIRRVPRQEWIIDENVLPRIIGQSVYDEAQELAKQAWVNNFNRENDKKLGLFGGKIICGICGRNMSQHRYKTKKGLGFEYHCPGHDIAPSICKAQFVNEKYILKAVTVLLDRWVKAAMKERKLYKKGIFLTKLKREFQQNMAIADDELQRITVKQQQIYEDYVGGLLDKREYLQIKNQYSEQREELIEKKGKLDMELNDAVRKYSMKNKWISSLLDIHGNICITAEVIDELIAEVRVVDKTSIEVIFKFKDIFNIDVECEVV

SEQ ID NO: 960 - protein, 451 aa, synthetic construct
MQRVAIYMRVSTDQQAKHGDSLREQQETLDEYIKRNKNLKVVDKYIDGGISGQKLNRDEFQRLLDDVKNDQIDLILFTKLDRWFRNLRHYLNTQEILEKHNVSWNAVSQQYYDTTTAYGRTFIAQVMSFAELEAQMTSERIKSVFSNKIQQGEVVSGKVPLGYKIENKRLVPTPDKDIVIDLFDYYVRVGSLRKTTTYLEEKHGIVRDYQSVRKLLTNEKYIGKLRNNTNYCEPIIDKDVFETVQLRLSQNVKTSGSHDYIFRGLVRCADCNGSMSCSTLKSKYIKKTDGEVSYYIRSCYRCTRRRNNPTRCKNKKTYYERALERYLLDNIQTNIAMHVRTLKKEVTKKDSVKRKKDALFVKIERLKKAYLNEIIELDEYKRDREMLENEIASLKEPKINKNIAPLKKVLSDDFFEKYEKASINQKNELWRSIIESIEVSVDGNITVNFLP

SEQ ID NO: 961 - protein, 563 aa, synthetic construct
MHKRLIISVMEKSKRVVGYARVSTEAQDITRQVELITAYCTERNYRLIKIIQEKISGARKDRKSINELLEVDDTVADMIIVSELSRLSREDDILSVLSTINELLKQGVDILFLDKQDRIYKAGTVLSLYDIITLSVEAKASADERYKIAGRMQTGLRSKLAEFTNMFTGGTVPFGYKVIHNPDYKLNLTPKNLLVVDAQEAEAVKYLFQQLIDGNTIRQTVRVYNKLYPYKLSYSGICRIIRNPKYKGEIYRRGKLYGQISELQIISPEDFDRANKQMRENELFQSNAPKYYNPLKGLIFCPCGCSLYMKPNHNSYLIYRCSSSYNDKQRCENFGIKCSYVLSAVWTCVKATLHTEEYLRFNSRRSQELQELNAQIRETITQKVNIADEQKAQSAALIDKIKRLTNSVLIGELEAEYNLLQNKLKQTEQEITELNGRIAENDAEIQKNVEQKDFSQMEQSALYKEKLQKVVYHSLSAMRGILEIIFKNGMIRYVLIKKHRNGGVFLLPEFWTVDISRAVIIVPTHPSVDPEHPYTLLPTIPREYTFDAIITERDMDEYRITVS

SEQ ID NO: 962 - protein, 516 aa, synthetic construct
MLEEGQKLKCALYVRTSTTEQKDSLELQARYKNNNFDIDKIYSEEVSGRDILKRPEQIKLLNDCGIEVTSVQKQAVFITNDKKPLYDCIIVSNTSRWGRNVVQVKQIVEALHKKGVKLWFDDLGKFSDSKDLSLTLDMLFVLDENYSQTISHKVKSAMDKRKKEGYILANSRLIGYDRTEEGTLVKNKDSNMVKSIFEDYAYKNLAIRKIAEKYQLSTSTITTLLKNIKYAGFMAYGIKEHGWDFSKLEIVKSDKIEPIISEELFWKVQEVRRSRSRIAEGSRVTRNKIGVNNNTYSLSSKIVCTNCGKNFHRKDRGYWICGTHSKYPKKCTMPTVRENKILRYLKSPYGLKAIRNGLETTLEGELKKLQLESIEPIKNELAELKGKSSKLLDLYMDSLIDKTTFEKRNKLLKDNIEKLENELKIYSNKENYRVKLLELQKEAKSLLDEYEKILESSEPEKIFDRVSKIEVGKIKDVKKGKEVSYIKSVRFKDFKVLEDHQLFDELTKKEEKNKSW

SEQ ID NO: 963 - protein, 522 aa, synthetic construct
MYAIYLRKSRADQEAETRGEGETLARHEQELTKLSIKMKLPIGAVYKEIVSGETISARPWMQQLLLEVMQGKWEGVLVMEVERLARGDTKDQGTVAEAFKFSHTKIITPTKVFDPDNEYDEEYFEFNLFMSRREYKTINRRIQRGRVSAFEEGWYIAGTAPYGYEKVKKKENKGYVLEVVPDEAKIVQLIYELYTTSQEDGTSFGSYQICERLNLMQVPSRTGRKWSASSIMDILRNPVYAGYQRWGWRKPEKQLIDGRIIESRPKNDDCKKVRGKFKPIISEELYEQAQLIRKCKPVPKTGITMLQNPLSGLIYCAKCGTMMTRAGSNTKTNYPVLRCPNSRCDNVSAPLLLVEQKLLTSLSDWLRKYELDWPKEEREEYASVISFKEAAYKSVRSAYGQTEKQLSNTYDLLEQGIYDIETFQERRRVLEEKRCTLRVELDELKRDYEDAIESDSAQRDYIPKVKNVVSVYWTINDVSVRNEMLKSVLIKADYLKTERNRKGQGATANFTLNIYPKTPKEP

SEQ ID NO: 964 - protein, 541 aa, synthetic construct
MQTTEIRETWTALYARLSLDDGNVGESMSIQSQKAILTRKAEELGIYNYRFYVDDGYSGTNFNRPSFQQMIADIEAGKVTCVITKDLSRLGRNYLESGAYIEVFFPKHQVRYIAVNDGVDSANSGEMDITPFKNILNEFYSRDVSKKVKSGKYIRASQGKFMGTHAPFGYQKDPEDKNHLIADEETAPTVRYIFQLALQGMGNNKIGKILYEQKIPKPAYYKPEYFGKFLVKEDDAYSWKQETVIRILRNPLYKGYFWVQKYDKKHFKQETRGYIPMSERTIIPSDHEALVDEHTWDTVQEILDRHTKVKPCTSGYENKFRGILKCADCGSTLMVHTDGRNKEKPVIERTFYQCRIYRVRGTGFCSQHRINADDLEELVLADIQTHAKRVIKNREKFMRKVLGQMDTTAANNRENIQKKLEKLEKKLLESDRQFIKLYEDFTKQLVSEQQFRMLSTHFEQEKKETTEEIEKLKTTADNLKDSTCKAEQLANEMVECAEIKELTTAIVNRLIEKIEVSEPQTIDGEKVQNIRIFYKFVGEIN

SEQ ID NO: 965 - protein, 460 aa, synthetic construct
MLIQTKIRRFNMKKVFVYHRVSSDQQLDGSGIARQAELLEGYLERTGICAEMDDPAPVVLSDQGVSAFKGLNISEGELGAWMEQVRNGMWDSSILVVESIDRFSRQNPFDVMGYINALMAHNVAIHDVMANIVISRSNSKDLPFVMMNAQRAYDESKYKSDRIRKGWAKKREQAFNKGTIVTNKRPQWIEVENDKYVLNHKAAVVKEIFALYQTGMGCPTIAKQLQTKEGEQYKFNRPWTGELVHKILTNRRVTGKIFISEIIRNHDDIENPVTQKKYDMDVYPVVINEEEFELVQELLKSRRPNAGRVTVKKDGQEEVLIKSNLFSGIARCTECGGPMYHNVVRAKRTPKKGDPKIEEYRYIRCLNERDGLCENKAMTYETVERFVVEHLLSMDLNTVIKEQEFNPEIEVIRIQIDQVKDQITKEGANKQVISSQADSLIKISRIWADFFPANTSNQPI

SEQ ID NO: 966 - protein, 467 aa, synthetic construct
MRRAALYIRVSTLEQAQEGYSVGEQRERLIAYCKAQDWLIADIYVDGGYTGSNLNRPGIQKLMSETEKFDVVLVYKLDRLSRSQRDTLYLIEEIFRPNKVDFVSMQESFDTSSPFGKAMIGLLAVFAQLEREQIKERTWMGRVARAKTGLHHGGGNIPIGYDYEDGKLIVNPYEAEQVRKIYEWYLSGSSLKAITDKLQDAGYTNKYSSYNSWSSVRNILENETYIGRLHFGDVVVDHAHEAIITEEQFNAAQILRGKRREQFGSHAFQSKHVLTGLLFCGHCGGRYYLRNTGKYSYYACYSRTKQMKNMIKDPNCQNKIWRAQDLEPIIEEKILALLRNPKIAEELAAGKPKAAAPVSKNTDIERRIREIDRQIGKLMELYQQDDIPPELLGEKINRLYGEKTALENSIAPVEETNAMPLDLVAELITNAAEIWDFADENQKRRILQSLISRIVLTDDQVDIEWAF

SEQ ID NO: 967 - protein, 602 aa, synthetic construct
MVQNHKGQNLYSYIRWSSEKQGQGTSHARQVSQARQFALEHGLNFIEVLDSGVSAYRGANAAQGALGAFIAAVEGGAIPSDSWLYVENLDRLSRQAITNSQELFLKLLRLGLTIVTGIDGRIYTTETVNTNPTDLMLSILLFSRAHEESKTKSDRTNKNVLALIDRHHQGLPVNIKAAGKHPFWIDDSGAQYESVRLHATYAPAAKKAVELFLQGWGSYRVCNYLNDHYQCPPALKYKNKHGTIRAEGWSITALRKMRDNPSLFGQRVLSIQNKTYTLNNYYPPLISESDFINLKSIKENNKITCNKQYNTISLLSGLNILRCAKCRGPMSFFTHRNKIRYVCETGKAQKGCVPWSMDGTIAERLLVFPLLKSFIDLKLKGMSNSDQYQHKITELNETLSNINTQISNFEAVIGAGINLDSTIANLRNLQSQRETITLELKKVTEIAALKTSREQTVEQIVEFLFDNLTEQIINDIKHPNRQELRETIRNLFANVYLDKQDDKTYTIAFESQDNSFVVYSGDPNIAPTAVAEPSFPSTLFEPSAQDLNEIERLRATIDPATLNKLGGLTFKINELEEKLWSKMQPILSRFTPVLNKELKARK

SEQ ID NO: 968 - protein, 525 aa, synthetic construct
MKTIRDVLEKGKKGAFYARVSSDRQTIDAQRHHVYEFIKNYDCEIVKEYVDPGESAFKKKLIKRPQIMALLRDVEQGKYDFVITYADDRLARSEIEHVQIRVIMKEAKTDVILTSTGELYTERDIITQLIREGGTRYEVERISARTKDAYGQRTDYGQWMGGPVPFGYVQDENTKNFFILEDEKEIVLKIYQLYQNGEGFADIAKILNEQKAKTNTIHWKKERVKHILTNPIYAGYVTFGRLKPGSGNSIEDLSKWKMAKCEEIPPIMTKEEWLATFQMFEKKRNKELPPKQLKTEYVLRDLIYCKSCDAPLLPKNQETRGKNGKKYGIKKYMCSNKLCKVWFSTDELHALVFDSVIKEVTDKVISKSQTELMYEMEQILEKDIKQIKKEIQRLKKQVDNCLVWIKDAEREIDELYNQKKKLVEVDPKIDPLLDVMLDYRLHLLHEIRGTEELIAKKEAEMKHIEDVDSNQGMLQKNVLQAFRIEFTNLQKDMKRVRQLLVYLIDKIIIDQNGKTEYILKINLEQ

SEQ ID NO: 969 - protein, 408 aa, synthetic construct
MIKVEKIPANEKGNKLIRVAAYCRVSKNVDEQLSSLEYQITHFESYKEKENDIELVEIFYDYGKSGLRRKGRNEYQRMIALALNNECDYILTKSVSRFSRNTLDVLVDVRKLREKHVYVYFEKEKIDTKRDDYEIILAIYASLSQEESIAASKNIAWGIRAKMKRGELAVKSIYGYRKVNDELVIVEKEAGVVKLIYFEYLRGRTLKQIKELLEDLEIKSPSSREKWDCKTINNILSNEKYIGNVIQQKTYVKDTLNGIRKENKGELEKVHILNNHEAIISEEEYNKAQELKKKRSRCIIDENGNKVIRHNQYSSKSIYSNLLVCGYCGASYRRRTERGKVVYRCATRIDKGRDKCQQSITLEEKCLKEYIEQETKNGDCINSCESVEMIEVFKNNIVYKYYGEKKSI

SEQ ID NO: 970 - protein, 524 aa, synthetic construct
MPVTECIAVYIRLSSEDNDVDGSIKAESNSVSAQRMLINEFIKKQDEFTNCPVVEYVDDGYSGTNFNRPGFQRMVEDAKAGRIKSIVIKDFSRFGRDYLEVGNYLEKILPVLGIRIISINDGFDSINSSGFTGGMSVALKNMLNAMYSRDLSRKVRSAMKTHAKNGEYMPAFPKYGYIKDPEDKHHLVIDPEAAEIVKLIFTMAADGKTKGQIAKHLNETHVLTCREYMCRKGIKMHRENEKEKKLWSVTTISDMLKNEVYLGKIIWNKKRVARTGSNKLVSNDKEEWIVVENAHEPIISDELFQKANEKAFTNQKRVLTKRGVACPIFFCPTCGRRLGFTSRETGYRCMQAHISGLSGCAESKMDRKEAEETVLDAARNMAQLISENLEKKKSEWHKTILKEENIATLESEKKRLSSRKMKLYSDYRSEVLDKEGYMEELEKTTSRISEITLQIAELENEIAVAKKKCDEATEKEMEVNEIAALQDFDKIQLSKIIEKVFIYEPGRMEISWKMDDIFYKEEKA

SEQ ID NO: 971 - protein, 536 aa, synthetic construct
MTAVIYARYSSDNQREESIEGQIRECTAYAEKNGITIVKHYIDRAISAKTDNRPQFQQMIKDSDKKLFDIVLVWKLDRFARNRYDSARYKTQLKKNGVKLMSATEIISEGPEGIILESVLEGYAEYYSADLAEKVVRGQTENILKGRCNGGRGTFGYTLDSERKFHIDPLASPFVLESFTKYRDGLTMKEIRDWLNENGIKNPVGGEFTYNSVEHMLKNRRYIGELKFRDVVVPDAIPPIVPLELFDDVQEKIAKNKKAPARRKAEDDYLLTTKLHCGCCGALMFGESGTSRTGEVHRYYKCATAKKKKGCKKKTVRKQWLEDLVVNQTMQLVRDDAAMESIIAKVMELQDRENTNLPLYEKQLRDAESGIQNMLNAIQAGILTSSTKERLEQLEETKRELEARIAEEKLAKPKIKEEFIRFWLMRFRKLDMSLKDQRQALVDTFINSIYLYDDKVLITFNYKEGTQTITFEEAAQAASKENGSDLDCFTAPRKTSTHCVLVFLFCLRDGRGSNRAAAHSTASNQPSATTTTAACG

SEQ ID NO: 972 - protein, 483 aa, synthetic construct
MNKKVAIYVRVSTLEQAESGYSIGEQIDKLKKFADIKEWQVYDVYEDGGFSGSNTTRPALERMINDAKRKLFDTVLVYKLDRLSRSQKDTLFLIEDVFKVNNIDFVSLNENFDTSTAFGTAMIGILSVFAQLEREQIRERMKLGLVGRAKSGKAMGWHMTPFGYTYDKKSGNFIIDEVAAGVVKMIFDDYLSGISITKLRDKLNSDGHIGKDRNWSYRTLRQTLDNPTYTGLVKYDGKTFPGNHEPILNNETFQSVQYELDIRQKQAYLKNNNSRPFQSKYILSGMAKCGYCGAPLVSILGNKRKDGTRLLKYQCANRIIRKSNPVTTYNNNKQCDSGFYMMQNIEAYVINSISELQTNPQKIQEIIKLDNGQPAIDTIYLESELAKISSRLKKLSDLYMNDLMTLDDLKNRTEELKQTRKNIEAKIFSEENKHGHAKSDIFRSRIDGNDITELDYDQQSMLAKSLIRKVSVTSETIEISWDF

SEQ ID NO: 973 - protein, 522 aa, synthetic construct
MARPRKPKVQSPARGRPVGGEKAVLYARVSTAEQEKEGFSIDAQVALIREYAERMGFVIAGQYVDVETAKKTGRMQFEAMLKYLRGHPGVRHLLVEKTDRLYRNIKDWVTLDGFDIELHLVKEGTVLSRDSRSSEKFMHGIKVLMAKNYVDNLSEEARKGMLEKAKQGIWPSQAPLGYLNVVGPHGKKIIVPDPELGPIVQRVFEWFETGDYALKEVTQKARDAGLRYRRSQRPVGNSTIHYMLRNRLYAGAFEWAGRLYQGTHDPLVTRETWENVQEVLDGRSASNVRAEALRFAFTGLITCGHCGCAVVAQMQRGRYIYYHCSGFKQKCPEKYVREEALALAFSEQLARLRMDDEIFSLIERAIRESHSDKSRERVETIARLRLEADRLQERLDKLYIDHLDGRITADMHDRMSATWREERAGCQRRIDVLHNAEDAYVEDGIALLNLGRKAHATFSLQSPSSKNSALNLLVLNSTWANGQLHVTFREPFDMLEEIGSGNPPTEPPTGSGGSGVSSWLPE

SEQ ID NO: 974 - protein, 439 aa, synthetic construct
MFPSLGCRFIALNDGVDTLRKNNEMLVILKNVMNDLYARDTSSKIKAVKLSTFKSGKYVGCYAPLGYKKSEADKHVLEIDPVTAPVVRHIFDLRLQGYGFRKIALQLNAEKVPAPRSFYYMAEGRENLRGETPYWNDVTVKTILRNEVYIGHMVQNKTGTVSYKNHKQVSKPESEWIKVENTHEPLVSQETWNAVQRMDNHPARGRSGKSGTIALFGGLLRCMDCGSSMRYMRDYRKKVSEKEPEYKAYVCNRYASGGKNACSSHYINQKVLTQIVMTDIRCKAMWAQNSRETLRTQLLAREQNASVERTRTLQAELNAIGKRLPELDKLIQSAYEDEVLGRIPESVCVNLLNQYETERREKQERRKELTEQLAASRETESSVDAWLDLMQDYAQLEELDRPMLVRLIQKIEISERRTVDDHEERDIHIYYNFVGYIEA

SEQ ID NO: 975 - protein, 539 aa, synthetic construct
MKTAVSYRRVSSGKQLKGHGLTRQKEMVTNWIKRLDLQLVDDLVDDGLSAFKGHHKSKGELGVLLHAVQSNSISFDCLLVENFDRLGRMGVMDQFSQFSILINAGIELHIISEDKIFTSESINKNPYELFGVLAQMARSYDESKQKAQRVKKAFDSKMKLVEEHGVIFTKTVPVWLKVNSERTKFTIKPEAELVQRIFQLALQGYGATKIAKVFTKEKIPVPVYDKRSNSIWTQNKIQRILSNHAVYGKFVGTKTTIERDGYYPAIVSKEDFFIVQQQSKVRLNHRTKTTTNEVPNLFSGLLTCGHCDRAMRTHKLKNAPFLRKRTFRCKTSAQTDGCCHNNSYHLKSFEIGMILVLFEIDFSTNKKNQSKLPFIKAQIDDFNKQNENLVQAIMSGNVSKLIINKSVELEQQIADLKKELIKEEAAENISAPQLNLAERDQIIEDALYNEVYDVRLKLQSKLQQLISNIKIYDFGVLIELSMNRKVFFKPLSNRDFTPMYTLRIPDDVFDGPNDWQQLVTKSKIKIDTSRIKRTANPVV

SEQ ID NO: 976 - protein, 489 aa, synthetic construct
MNAPKTAIYLRQSKDRDGNELAVHRQRDACLKLCREKKWHNTAQYIDNDRSASNGKRREDYQRMLTDIAAGRIGRVVVWDLDRLHRQPIELEHFMKLADDKHLALATVTGDVDLATDNGRLFARIKGAVGMAEVERKSARQKAAAEQLATTQVKVQGNEGARAWWAHRPFGYDADRDGDGKWWVYDVKRDRHNPIHKHPKESALLAEAYQEFNRGTALGTVAARWNKAGVTTPQGKPWSGTRVREVLLLARNAGLREYGGQLVIDKEGEAVKGAWPAIVTKEVWQAAREKINSNRGGPYRGRKYLLSGIARCGREGCGAALTSHISARGKLQYACLRCHKVSRSADKLDELIVAAVVGRLSRDDAVELLRPAVEEVDATALREQRRALHARLAQLGKDFVSAPPEFTQAALADINAKLADIDATLNDPGKAAVFEDVIGAPDVERAFNGLDLGRRRTIVDALMSITVNPVGKGTGGVWNPEAIDVAWRS

SEQ ID NO: 977 - protein, 455 aa, synthetic construct
MIIWWRMDRAVRSMADMAELGRWAKDHGKLLVFAEGPGGAPLELDMRTVSPVSELIMMMLAFSAQMEALAIKERVTGAMAALRTQGRYSGGLVPYGYGKVKNPDGEGFKLAPDPEAVKVLSGIIRDVLDGQSLTAVAMALNEAGTLVPRDYQAVKAGREPGGMRAGRRHDRFKWTAGTLSKVLRSPALMGHRIHNGKPVRDRDGKEVLIGEPVLTREEFNILQDHMGTLTPQKNRTRKDTQAMLLGVAKCRGCGGNLYLSKRAGGSDYNCRATARGERCQAPAGIRADWLEKYVEEEFLVRLGHFQMTKVITHKGYDPTPELREVQEEMRALLAVKGSLGGSRAAEAIWTEEVAALGRRLDALESTPRTEARTEVVETGETYASYWARHDAAGRRQLLLDAGARATVAKGRSGGGAERLKGPDPERLAFTIGAHQDPEAAALEAVEEEERQAHLD

SEQ ID NO: 978 - protein, 547 aa, synthetic construct
MPLKKVRMLLRVSSNQQLEADGDLSVQRRIVKEYIQKQEDWMLDEKEYFEGSNSGYSNAVSDRDVLQEALRDAASGQYDILVAYKDDRIGRRMWEIGSYVMALKGYGVDIYTAVDGGISPESDDIMGQMMLALRYGNAQKSSSDTGKRVKDTAQKLVQSGKFMGGKAPYGYILEISGEISKHGRVLHHLVIVEEEAEIVRYIYELAANKEFGSQKIAQILNADIKYQNKMKGEKWKTGTITSILTNPVYAGYTAYKRREKLNGRYRRLDRAEWILAEKPNQEIIIVDQELWTRVQEQREKRRVKYQKCEENKDAKVITRNDGMLALIDVLYCGYCGEKMTNGTKYNYWTMKETGERRASRVPAYKCQGIWQGIPHEKQSKLQANKIEPIVFKAIAGYIGKLQEQEDAFVQIRDSQNQERKRKREELNREKKAMEELERKIAIMEEKIPNAITGEYPLSLGELMNLIKKEKDKGEQQRREIQKKEKELEDMIVSMQGLEELRQKIPTWQEIFLHAKTPVKRVLVNKLIERIDVKDTEIHIRFKIHPGE

SEQ ID NO: 979 - protein, 596 aa, synthetic construct
MSKIIPHLYCRVSTSHQLQGSGMDDQSRVVTEYVKSKPEVFDVSKMTLLKDEGLSAYKGEHLQGDGALRGFVDDVESGVIPSGSALIVYSLDRLSRLNPWVGSHLISTLISKGIEIHSVSENSVLKSDDPIGSIISGIYLLRANNESVLKSERAKDGYKARLQKSILNKTILTKQMPRWLFDDNGSYGVKKDMKDAIDYIFESYIDGLSSGHIAKELNTKGLKNNNTSWTGSYVAKLIRDRRLIGEHIRLSAQIKGVKREIIEKIPEFYPVVVDKDRFNLANNMLDNVAKNIRGRTRLTYGDTSVLKNLFSGVIKCGLCNGMTTVVKNSKPVKLPDGSRKYVAGTTFIRCRTKYEYKSCKQGDVKYQTIEKAILEHLMGLDIPALLAKPVDNKLDIWKSELNLCISDRNDYKRLIDERKALGKRASVESLEALQEVTDRIEELTSLIESHVDEDFVPVFDAIDLEQITDVTNVEERALIKKSINSLVEKITYKTVSGFVMLEFTYLYRSIKHVVIINKTESKVVVNFSVESRDDVVEFVCNQFMMRYYKYNNEFDVMGSSLIDYSHMVNFVDYLEDDVSRLAKEFLVKNMDRMVLL

SEQ ID NO: 980 - protein, 562 aa, synthetic construct
MSKRPARAVIVTRLSREVENSTSIERQEQYCREKCEAEGWEVVGVARDVNVSAGGRNPWQRAGLSEWIGKHKGDPGRSREFDVLVFWRMDRLVRSVTQLWELLIWAGENGVTLVSATEQMFDTTKAEGKLMISMVGAFAELELEAIRERTRADQRHRINSGHYRGSLPPWGYRPVQNEQGNWVLEPDPEQTKTIDRVVHALLHENKSVTAVCKELNADGVPTVRDLNHKRNGRPMRGLFWSTSALIRMLEKPTLLGLVTAQDEILDAHNRPARDAKGSRTYENEHLVLGPDNRPLQRAEPVMSREDFDAIQKLLSTRSGGNGTTGAGDSLLLGVLFCGVCGRKAYHYKREKQGRQNVYRCQTVASTVPVCSDKQVTVNAGWIEGVVTDTFLGLFGDSVRTVRVWQEGNDVSTEIEELHDSMDAVAGVLARQRPGSAAFNSLTTQIEEIQARLDELEQVETVPSGWRWIPTDQTVAQWWENASNKERNKYLIDSGVHVEFEHAGAKQRGIKPAVRVTFEDYAGILEQLTPGIPAARVADVLAEVPEGTTVHIDSAGAHLEERE

SEQ ID NO: 981 - protein, 510 aa, synthetic construct
MAKLVVAEATDLIPVVSYARISADVRGDEHGVQDQHRVNRETAARYGWTVVHEFTDNDKSAAKADVYRDEFELMLKALRAGKLANGTAVRGVVVVANDRLARRPGDYERFVEAFTYNDGFVFADSKQQSNLYSEDVESMGLFGAVISKMEVRKMQRRMRASHQARALQGRKVGGPRPFGWKEDRIALDEHEAALLRQAARDFVTGSSLYAIVMEWKRRGIKTPRGNDWQMRTLRLTFLNARLCGYRELRGELVRDANGDPVIGEWQPILTPDEWLAVREIIHARRGHSVKRGGAVGTPYPHDFREHRYLLTGILRCGRPIEGGGLCNAILRTKRTKDGKRHMYFCPGKAAGGCGGIGRRGDLVDFAISELVLEQMELVQYVDAEDAPEWTREQELKDLEGQLTELTSRWRAREISNNLYFGLVSELEGDIARLRAEKSRILGRAERKRASMEIDMSEIRRRWYLPEEEGGLPLSRKRAHVREMLHAVIVHPAGRGRAPFNPDLLEPVWVE

SEQ ID NO: 982 - protein, 475 aa, synthetic construct
MIGWAEDVDVSGAVDPFETPQLGDWLKNRAPEFDIIVAWKLDRITRSAIKLNNLISWCDEHDKIMLTTDNGLNTGSREGRLIAGIVGFLAEGELEAMRERQKSSRQKLRELARWPGGRPPYGYRAAPNPNGPGKVLEIDPEAHTVVQRIVQQVIDGVPLVRIVRDLNRDGVLPPRDYYRVQQGRQDTLTSWGTGPLRFLLSSPSLVGQAHLRGVVQRDDQGRPVQLAEPLVTEEQRMLVLAELERTRGVSRERAEPAALSGIALCWFCGGVLHMTTLVKKLRDGKRRYRYYRCPKGCGQMLPADDLEQLAEDNFLDLLGAVEVRKRVWVPGDDVEARKRSAVMGLETLLETAGRVSSPTAAAALQKQIEALSGQIAELESTPAQSGRWEHRPTGEFYRDVWERSSDPISRRELLKNAGVTIRIGVSGRERGTGGAWHIDLHTDLTDLLTPEQFERMMEERDRQAALWRRQWGISD

SEQ ID NO: 983 - protein, 473 aa, synthetic construct
MVPKIAVYTRISRDDEGDGLGVTRQREDCERLTDLRGWAVARIYEDNDVSAYKRNVRRPEFELMLSDLADGLIDGVVAYDLDRLARQPKDLERLIDMYDGRKRLVFATVTNDVNLGTADGRTMARVMVAFANKSSHDASRRIQRKHLELARQGKPSGGPAPYGWLKGGRKVDPVAAEHIRAAQKELLAGVRIGTIRTDWQRRGIGHTREGTTRLPHHLVEHMLTNPRLCGYRTYHGEVLLDDDGLSVIGEWETINTVEEWEAVCAVVLERKQKYPGRSLARKYLLSGIARCGLCHAKIRGQVNRRRKPGSTGPKFSYQCSVVNGGCGGVGRAGEAVDEFVISLVLAEQRERAASSTVEEAEPWSNASELADVEADIAALTQAAKAKEITVSTLLQLLPDLERRRDELKVERARFSKKRQQAVSLHVDTVEDFLALPLERQQALILHSLSAVLIHPAGRGRRKFDPSLIEPVWR

SEQ ID NO: 984 - protein, 521 aa, synthetic construct
MATKLQVASLELRAYLRVSKDASGEERSPNEQWSDLEDDGAAEGFTLHASPYRDIGSASRHARKARTNFDRMVRDLVSGEFGADGLALWEPSRGSRKVSEWARLIEMLAERKLGVWVHTDGRLYDLSRARDRKDLQDAAVDAEYESGKTSERQIRSQAARAARGGAAGRLSFAQVSEYDPRTGKLIRRSWDDEKAALVIEAFNWVDRGKSLNTLEKKWYKDGVRNGVGNAFTSVQIREMLRNRSYIGERVHVAGQIIRWWKADPDDVTIIKGDWEPLLKLEDGSADRALFDRVQDILTDVSRVTTRGGGARHFISMIAKCDVCDGVICANKRHGKPVYVCRAKGCVTIGQEITDKFAEELIIEYFSRDDEYASLNHNVDDTAELAAAKRELLEIDAHYQSMKSLMGKRKMSPEAFAELEPGVLADLAEAQRKVDMLRTPAEVREFLRPGEDIEARLEEADIYELRKIAAYVFSPARLGEFRIMKSPIRGHRVPVEHRVRFGRLDTERVERPGEAANPVGVV

SEQ ID NO: 985 - protein, 533 aa, synthetic construct
MIKDGYINDPEHIILIEDKESATKLSEEERQGLNKMKANIESDPDINRVYVFELSRLSRRPEILYSIRDYLIKKNINLIVLKPYMRLFEDDGTISPAGSIMFGIFGAMSEQEGYIRKERFKRGKMKAQLEGKSLGNWLPLGYTTDSERHIIVDEEKANLVRKIFTMCVNDNKSTTVIARELTETGEYPTKSTIRGHSSSILNILRNTAYIGKAPYNKKDKKENYNQYPRIIPTELFEKAQELLSNRKKLPKTGHKNIYYCKGLLVDKNSGRVLRATPAVASYGFTSDRSDPVKYPTITVPINLFDSFAWHLTVQYHKKNVPIDTQKMRAELLKEINILNKKAETGKKQLTELESRIEKIQERIISGKLKEALGDKMLNEIYQQQEEILDMIPHWETEAFNKSAYWHATAMIDDDGAAKDLSSVTDHEKRQQLIHEVIEKIIVEKGGIPEKGRIRKRGLGVKYGTMEVHYENGTVEQYKYNSYTKKCFTMDDVEVPYEFVLRIKGQQHQPGYKIINKKMRERLKAEKESKKSKS

SEQ ID NO: 986 - protein, 506 aa, synthetic construct
MGREERTKDKSVAYSYIRLSSKQQIKGDGARRQIEAAEQYCKQNNLVLSSKTFRDLGISAYKEVDRPSLSDLHQCIANGMIKAGDVVILEKLDRLSRQGIAKTQAMLQEILSQGVVVVSLMDGLTLDRDSLNDLTLVIRIAIASDIAHKESQAKSLRIQANKDAAKAKAKQGIAIPRKLPFWLSLIDGKYELNNRLSVLQTIIDHKRLGASLAKIAGALNNANIPTANQGGIWNPSTLRDVIANPALYGAHQVRTKVQGKYQPNEIITDYYPAVISFSEYTELNSKAVQRPAGASETNHISGLVYCDHCGKKMAAKSRKNKTGKVTYYYCRYALLKTCEHQAHVRDLHKHIISNADRLEIQQSIKEDKRANEILIELSQIDTRIQELSGSLANMSSVVATSAIISALSSLEGQKKALIAEQKQSVPIAADAVKTLLTLVDDPKQFNIQLKKIVNEIRVSQSGKGHIVKVKRHDGHKIVFHTNGIMGSSDTKQISAELQELLADVDV

SEQ ID NO: 987 - protein, 453 aa, synthetic construct
MIKGACYVRVSTDNQLENYSIEEQTDRLKAYCKAKDIQIVKIYTDGGYSGGNINRPALQQMLQDIGKGLIDSVIVYKLDRLSRSQKDTLMLIEDCFLAKNVDFVSVNENFDTSTPFGRAMIGILSVFAQLEKDQITERFTMGRIGRAKNGYFHGGGNAPTGYDYIDGELIINDYEALQVKDLYNRFLKGYSIHNCWQYMHQKYGGWSNEVSVRNVLKNELYIGKVKFKGVAYQGNHQPIISEEIFRQVQDLFNSSRRTSDTFKRSPFKANTLLSSLVYCGKCGARFHGEHGNYSCYSRTKGDKKYIVDPNCKNKKWKIEELNKLVLDYITRLDFSKLQNSHPAPVPVTDYSLRLTEIDKQIEKLIDLYQVSGIPLESIQKKMDALTKEKEALLNVSKPKNVPITTLTEMITARDTLMSLADTGSLDEKRACLTMIIDRITIDDDNVNIKLKHL

SEQ ID NO: 988 - protein, 626 aa, synthetic construct
MKEKPRLYSYVRFSSERQATGNSLERQKDSIANMVKQVAIDHDLEIFEEYEDFGVSAFKGKNISEGGALAEFIKHVDSGKVPKGSFLLIESLDRFSRANAMLAVNLFTSLLLKGIVVVTGIDKQVYQQTEVNNDTMQQLMFSVMLFSRANEESSTKSKRTISSALAKIKRHQKRKPGDPVVAITELGTDKFWTDSSSGYVEPHPVFYPIAQHMIQMKRDGWSNRMMLRYLKDNYPAPKKLTKLSKGEWNIQHCSRILSPAIYGQKIISVNEQEFVLDDYYPAIITKAEYEDLSVQVGNRGFTKDKNPDIPLLSGIGILYCGHCGTHMYKMKSSIAKQPNAYRYVCGSRDYHLNCSKWGFRADTLESALLQLIADRVFVQNDKPKHSGVENQISELDEQIANYLVAIGTAKSPAMINNLTALIDKLENEKAELVKQKRLHDESIVRMNLEGWDKFRDFDVSDIYNIERLKIRASIKTVVQRIECKRLPDPKHTLFNVLYRDQRTQRIVIKANTSYKSGCVYVDATTINDRQFMESWGLIMHSFIDVLIDPEGFARKCEELQERVRNTRTIISELEDEDGEPEPRPAFTGIVKPVSVGESFATIDGIQYKVDSMEHLEELLKEKGVLS

SEQ ID NO: 989 - protein, 580 aa, synthetic construct
MSQPLVISYVRFSTARQATGDSLRRQTAAAREWCLKRGWTLDEKLSCRDLGLSGFNQDNASRGALSVFLDKVRSGDIPGGSYLIVENLDRLTRAELPVAVSLLLSIVSADIICVTLQDGQEWTKERLANPADFMLSVMLLYRGHDESKVKSIRIRAVHDKAREERDRSVFGRAPGWLRRTSDGKAWEPVPELVEVVKKVFDLSASGYGGVAIARRANEEKWPVPSLSAKESGTTWHVTFPAKLVRNRAVLGELEFHVSRDGQPTPTGQVVKDWYPQIVDEDLFFRANAAINSRRSKPNRRDATYRNIFQGIIFCGHCGATMARKAKAGGKKNSPGYAQFVCSDRHRGASGCPSINAKELEVGLIPSIFQMLREHLGNEANLDPIRKELAAVHGELEEFQKRRGRLADAIEQADVPIPVLVQRLTECEQAIPGLEARESVLKAQLQEFTFSPDDDTASDAILRALYSDDEASERLRAETHLKMLLTIDAIWVWPQELAVIQWKSTNLLAPLALYKPEKRRTGRAARNPIEIPKSFNVSNRYLEAIQGKIDFPEKRQPQLSENATIHTQKRRRNPINPPSAD

SEQ ID NO: 990 - protein, 509 aa, synthetic construct
MSKAISYIRFSTGKQAKGSSHERQQAMLASWLTANPGFPLWTESFKDLGISGSDGSHLKGGFGKLLEAIDKEAIQSGDVILVEAMDRIGRLEPMDMLPILSKIVKAGVDIVTLDDGIRYNRESVNNNLLFLLVAKVQQAHQFSDTLSRRLKASYTSRKKAAAEGVTPKRNTPVWLTSEGALIPEIAPLVKQAFEDYASGLGERRIFERIFEGNTNPLLARMAPSTVKRWMNNRTAIGEWNGIPSVYPAVIEPELFYRVQKRMEDKFSPRGLPTKHRFTGLVVCAECGKNFNTKHYQATGLTSMECSSRARRGSTGCSNNRSIPEPIIDLAFHFTNGGHIMKALEGQQLTASQKRGVELDGEIGEVNKKIGRIVSAIAVLEDDSEELTDKLRSLQAERRVLQAEKDGLVTDNSASIMDKVKNMSDFTKDPMKANALLQSVGYQLVCHVDGRVTFENETFMYEGWGRAEDVHNVVLPDGKRIKLPIQRKGKASKLKPVDVSQLGKLDLTKH

SEQ ID NO: 991 - protein, 510 aa, synthetic construct
MPIVITDMCILRGSNHMRQKKSAIYLRKSRSDEGIEALRKHKEMLIRLADSKGLHYDIYEEIGSSISLDVRDELNRLFANIDQYENVIVMDIDRLSRSLADMEQIKNLFIDKEIKIITPSQVIDLSVDSQELMVDFQSVIANAEYKQIKKRMRRGRIEGARAGNWVAGITPLGYNIDKKSKKLVPNKDELPLVREIFRMALTNQTPADIADHLNKRGYKTRKGNKFTAYAIQTILSNMAYIGYVVYRENPDIKGRKPEEVVTPNAHTAIISELDYLEVQKLLKARRTNHGRNSALYRTYLQGLVFCAECGRQMTIQFTSADKDGRNVDSINFQACRTEGCKTQGISCKEVEEAVRAELYSLKSKVFHQFQQLKGQDNRGKEVEYSTLIAKHQSEIKRGEGKLDNLLDLQLDGAIDKDTYSKKKAEIQYDIQELRQEIKRLELSIQKLDKDSQSNMLLHTMRMIDKIDIMDKEEANRWLKTIIARIEYSRPKPNSLRRSAKGEPVINIIAM

SEQ ID NO: 992 - protein, 536 aa, synthetic construct
MPEKIIMEIPANPLLGDLRKRKRKLRVAAYCRVSTEEEEQQNSFEVQVSYYTDKIIHHDGWQLAGIFADEGISGVRIKKRDQFNEMIELCRKKKIDLILTKSISRFARNTLDCIKYVRILKSWGIPVIFEKENIDTSNMNSEMILTCLSSFAQAESESISGNVTKGIRMGYKQGRFAFRYTGFGYRKGADGEPEIIPEDAKTILRIAREFLNGDSLKGIKEKLEKAGISSPAGELKWTTQTIHRILQNEKYAGDVLLQKTYTSDFLEGKVKKNNGELPQYYIKDNHPAIIPREMFFEIQEELARRRSKKPANTKRAKTNRGRFTSKYALSERLVCGDCGCYFRRVTWNIHGRKQIVWRCINRLEFGPKSCGKSPSLEETALHIAILEAIRSLVHGQQEEMAAALQDTLIHCIAGEKEEASPIVIENEIKELETEFDRLLVLAVDENDIIDRKLKQISESILKLKQQKKKIEYAAERSKAMESKAKEVMGLISAEDLDLTEYSDALVFRIIERITVLSKAEIRIRFIGGFEITQELQ

SEQ ID NO: 993 - protein, 546 aa, synthetic construct
MSLKREYLIELGIEHIINYLRRSRQDEERERRTGEDVLKEQKEIMDRILEPLGIPFTQKAEVGSGDKISTRPVFQNVIEELRAKKYQAIAVKEISRMGRGSYTDMGLIYDLIVDNRIFIITPYKTYDPRNSSDLRQIRFELFMSREEFETTRERLFGGRVNNAMAGRWVAGAAPFGFNYNKTTKKLEINEEQAAVVRMIFNYYVNGVPQENGTRRDVSFRALATYFSKKTPIKTPQGKREWTFMQLKQLITNERYIGTMKFRVHQTINGKRVVRPEEEHIIVPNAIPAIIDMETWELAQKKVKDSSHKPRTKMDFSPCELAGLCICNQCGKRMVRQYSTQNYKTKAGTINTYHKEFLWCTTSGCTFVKYRAIEEDLLETLRHFHDMEDDLLKEEISTKLTEDKETNNADLIEDLTGYFEQRTKELKNRLSFIYDKYENGIYTDEMFLERKAEIDREMEKLKDIKENQSTENNEQKFDPQIVKKNIGSILEAYKTNTNKTQRNKILRSVFDHAYITIIEKGRGRKPAKHVIYPVLKHNILQDDFLVP

SEQ ID NO: 994 - protein, 498 aa, synthetic construct
MEATATTQLGREYLRVSKDKSGRQRSVDEQADDNKPACLGHGIQLGQPYVDNDRSASRYAKKARDGYDRLVTDLKNGTFGADVLVLWESSRGSRKVGEWVTLIDLLEEGGHKVFVTTHGRLYDPANGRDRRTLLEDAVDSEYDSYKTSARIRRTLTAQAAQGRPHGIPAYGYRSVYDPRTGDLVNREPHPTEAPVVVELFQRLQAGHSQMSIAQDFTRRGIRNRSGTPFTGPNLRSIVLKPAYIAKRVHHGQTTDAIWPMVCEYEGSGVSRDEFTAIYHAVQRRLLGRKPNSPRGGRATHELSRIIRCGPCGAGLSVYFYKEGQGPEGEMFYGCPARGCCMVGKKGVDELVIGAMLAYLASDKVYADFAAAPDNSPELVKLRARIAELRGNLAELEEATPTSLHETRLLARAIETVTGELVDLEAQEHALTMPSALRDLIQPGADVERRWKAAPISARREIARLLLSPDALGEVRIKRVGHGGRTPARERVEWRTTEH

SEQ ID NO: 995 - protein, 545 aa, synthetic construct
MKQYCIYLRKSRADMEAEAHGEGETLARHERALLDLAKHKQLSIGKMYREIVSGDTIAARPIMQQLLSDVEQGIWAGVLVMEVERLARGDTIDQGIVAQTFKYSNTKIITPMKTYDPTNEFDEEYFEFGLFMSRREYKTINRRLQRGRYASAKEGKFVGSIAPYGYRIVKIPNDKGNTLAIVPEKAEIVRLIFSFYTRGEKGEDGEYRRLGIQAIAQKLNKMGIPPIRHDYWQKQTIRDMIINPTYAGMIRWGWRRSIKKMINGKPTKSRPITDDKNCVLVKGLHEPIIPKEEFDLAQKYINEIPPVPVGYRKEIQNPFAGIIVCGVCGRKMVLRKGKVRQDKPQKPDYIVCHCRACWNVSAPFHFVEEHIFDALKQWLDAYKLKLKNHENAPAVEKEQLLAALNAANTEISLLKNQLNKIYDFLERGIYSEDKFWERSASLSERINKSETAKKSLEKSLKKISSKNAAALFVPKEEHLLDVYDKLPSAAVKNTMLKEILEKVVYIKRSSGCVNGNSAADFEITLFPRLPDESQPLDTKKAARFF

SEQ ID NO: 996 - protein, 461 aa, synthetic construct
MEIYEENDISGKGHKRRPAFERLLTDFEHGLIDVVVAQEWPRLERNRSDGVRVIEAAQRHHVLLTFAKGSDIDCTTAAGRLSADIFSAIARNEIEVKAERQSRAQRQREQQGRPPKGVRPLGFTTNGDVIEHEAEAVRKIYASFASGASLRAIAAALSGADGEDVPEVPTLPRHNRALTLERNERRANEGLHTRPVPDDGPWAPSTVLGILRNPRYAGYSTYTPKETLANGDRRRSWRAQIVRDEHGEPVLGLWDRIVDVNVWEAVQDRLDDPGRVTNRVGTDRKHLGSGLYLCGVCDKPVKAHGQRYRCAGHVVRAREQVDAFVVEIIRRRLGLPDLQDLLPHADEPRLREIKDEINEHRAKIRRAQRDYDDELIEGLDLKRVRDRVNAAIDTLEVERLRLSLGRNAHGVVSSKDPVAAFDNGDLATRRSTIEVLCEVRLHHHPRGRKTFNPDTVTISWR

SEQ ID NO: 997 - protein, 513 aa, synthetic construct
MELYAQYLRKSRADMEAEQHGAGETLARHKYMLDQLANSMGIVISKVYKEIVSGETISDRPVMQQLLQDVEAGMYKGVLVVEVERLARGDTIDQGIVSQTFKYSNTQIITPTKVYNPNDEFDEEYFEFGLFMSRREYKTINRRIQAGRIASVKEGKYPSHKAPFGYRVVKLQNEKGYTLEIIEHEADAVRKIFDMYVNKLEGATTIAHTLNALGYKPRISNIFSTQAITAILDNPVYAGYVTWERRKEVRTMQNGIVKKSRPRSHNYIKCKGRHQAIIDENLWEKAHELRTNKRIATPRKSKELTNPLCGLIYCTKCGHKMQRRPAGSRQPADVIMCPNNECNNYASYMSLIEKDIIEVLCDWIDKYSICSKQDNELTLNINTLNNNITALNKELSTTKEQLNNAYNFLERGIYTPEVFFERSAALKDKINTIEQNIHNIQNEILKEQKQQQAKLNFLPKVKTIVDCYWELDNAKAKNDMLKEVIDHIDYIKEVKGRGHEDDFKLTIYPIISK

SEQ ID NO: 998 - protein, 543 aa, synthetic construct
MNEMKKKRIGAYIRVSTERQVEGYSVDGQITQIEQFCQFNGYDLVDIYADRGISGKSMNRPALQRMLQDAKNGKLDCVIVYKINRLARNTSNLLTIVEELHRQNVEFFSLSERMEVKNSTGKLLLNILASFSEFERNTILENIYTGQHQRALEGYYQGNLPLGYNNIPDNKKELIINQHEANIVKYIFESYAKGHGYRKIANALNHKGYVTKKGNPFSISAVTYILSNPFYIGKIQFAKYKDWNDKRRKGLNDNPVIAEGKHTPIISQDLWDKVQARKKQVSKKPQVHGKGTNLLTGILHCPNPQCNAPMAASNTTNTLKDGTKKRIRYYSCSNFRNKGSKVCSANSVRADVIEKYVMDQILEIVKSDKVLKQVVERVNQENQVDVAALNHDIAYKQQQFDEINIKLKNLIQTIEDNPDLTSALKPTIHQYETQLNDITNQMNQLKQQQNQEKPSYDTKQIAALLQRIFQNIESMDKSQLKALYLTVIDCIDIRKDESHKKQFFVTLKLNNEIIKQLFNNNSLDEVLLSTSSLFLPQTLYLTI

SEQ ID NO: 999 - protein, 482 aa, synthetic construct
MKAAIYVRVSTMEQAEEGYSLDEQVDKLKKYCEIKGWNIYKIYRDGGFSGANTDRPGLSEMINDAKLRAFDTVLVYKLDRLSRSQKDTLYLIEDILAANDIAFVSLNENFDTSTAFGKAMIGILAVFAQLEREQIRDRLLMGKIGRAKSGKAMAWGIPPLGYVLPESNREKYEIVPVEAEIVKKIYHDYIAGKLVAKICDELNAEGHIGKREPWVHANMKRTLTNPVYAGFIRYRGEVFEANHEPIVSKETFDLVQEQIELRQTRAYQKFNNPRPFQAKYLLSGLIKCGICGARFEVIQYKPRADGSRIRYYKCVSYSPKNHAPSMWKNSDGCTSPKYYLDDLEKELLSELEKLRDDPSLITSYVSKTNQIDVSGLKKRLKTLNNQLKKLVTLFIDNDFPKDVIESKKKIIMDEKKLILDKINEAESIKPEVSTNEVIDELGQIKISMFDLDYEEQKRIARKLIKEIILYPDKMEIHWAFAI

SEQ ID NO: 1000 - protein, 546 aa, synthetic construct
MKNLTKVYLYQRFSSPKQELGSSLYRQGNEQRAWLERNKDWAVEAGLYEDKGLSGHTGAHLDKGSLGRLVNDIEIGRVRHGSIILVERFSRLSRMKVSETQELLRKIWKAGVTIVTAKDDARYGPEGEDDLGIQVKLLVEIHGAFSESQNRKERVLGSYNKRRDEARKGITPNIRKPFWLNSDGTVNDKHVVIKDMFELYLSGNGQRNILNQLKDKYPDLLEVQRMNPSTVIKWITSDVVLGYWRINEFECYKVYKAAVDESIYYKAQTVHEKRLHKNVNPNREWHLSGLVQCGHCGNGCSIQKSKHSWPVLRCSYKQRLARNACSSKGIFPYLLPLYFFRSNLEHFFLARLMELSQNEKANLTVSKLDIEIIKCNEKLQVLENKLLSSENEMINSLLKVMEKITAQLNELKGQREEAYSIATGNSILNWVDLKDITSDSKRLNLLFQRLDSKMVIKDDEVSFDHGDLRKTIKYLGYSRKDEAYRIEKNYADMGDLEDEHAVIFIDDQIVAYDELANMLEKMGEVTQLEANIKVLTNLHPKQVIID

SEQ ID NO: 1001 - protein, 524 aa, synthetic construct
MTSTRVYSYRRFSSGRQAHGHSLERQTASARAWCAEHGYELDEEFEISDIATSAYTGKNATDGALAAFLLAANDGKVPSGSILLVESLDRLSRNHLTDAIALLTSIVRTGVRVVSLLDGKEWNQENINDTMNFMMSVLLFARAHEESATKAKRVRAAFAKKRDAGLPVVSHGHGPGWAYPREDRQGWELDETKAESVRMVFDHVAGGLGGIAIARLANAEGWPLPWRNRANTNTRWEHTQVSRLVRDRRVLGEWQPKQMADGALIPLGDPVPDYFPRVITDELWAKVHAALNGRTGIPRIRGVKADVLAGLFYCSCGEKMQRKAPWKRGYSRYYCLGQIAGKSECRAIGEAAIIEHGFSFLGTLENGQFQETDALRLAREAIDDATAKLAELDERATRYVDAIEQGDGQGSRLITQRLREIEAQQDALHAVLNQRRADLAAAPKAGVDFGALFASDVRAAVVDSDAVKERHRIATALNRLLTKIVWHQSLGALLMYTRDGGMATYLFQPGELDRAVRRDKGRGK

SEQ ID NO: 1002 - protein, 529 aa, synthetic construct
MTNRPKAYSYVRFSTPEQAKGDGRRRQYKAAIEYADKHDLELVKDGNYAFLDAGVSAYRGNNINRVSSSLGRFYEYVKEGKIEPGSYLLVESLDRLSREQVTEALVRFLDLLNSGIIVVTFGDGTVYKKSAEPMQLVMSISHMSRAHSESSVKGQRVSDAWQQKQALARSEGVPLGAACPQWLSFDGEAYKVIPERVCVVKRVFELTVQGYGQRAIVKIFNNEGVPVFGSEKRNKSGLWGSSSIAKILGNRSVLGEYQPTVWAEGRRRISGEPIKDFYPAVVDEELYYAALEGRSSRNVSRATKTSSNFNVWAKVAQCAYCKSPMHLVNKGKPPKGRKYLRCSRSTKGACINRSIRLDQSEIVFKEILAKLNLASLIKDNAQVLRKRIVELDGRLESAKVKLLEVSNLLECHPSRTLAQTAVNVEGEITQLESERDECKATLASEHITDKNELFRRLDLDSYEGRFLANQQIQRLKVRVLLKHDEIRVQYSVFVGDLPKFFYMCEHGEECLFVPISSELLRASIRQDDM

SEQ ID NO: 1003 - protein, 538 aa, synthetic construct
MPYAPEYLHLVIPGVTFEALLYGRNSDGDGTESSVAAQLATGRALCNSHNWRIQREFDDADTSASRHGRKTRSDFEALIETITEPAPPGIRRIVVAFQASRYYRDLEAYVRLRKACIETDTLLCYNSQVYDLSRRDDRKATAMHAVDAEDEAEGIRDGNLRTAKSQAAAGMPHGKLHYGYTRTYTTIRGRQRCTGQHEDERGKYVVQSLHRIDEGGSLRGLVRWLKAQPEATRPDGKPWTDQYVRSMLLNRVYLGERTHKGLTVKAAWLPLKGLETPEGRALFNRVTARLTDPARLMQRGSEVAHLLSYLALCGECGDHAALRYLAGSPTRKATLCCATNDTSIVEARIDAYVQEAVIDWFSDKRKARAALVPADDKVKEMAAATQRLINVFEEQLAEARQLAETFDEELGRFKLSAVSLASLESRLEPKLEAARKKLQSFAGVSPLLLRMLEADDPDEVWNGRPGEEGRPAVRGLTLEQKREVIRSVVTVRLFKAQASGRRALDDDRIRLSFFGEPGFRARRLRAPEPAAGLAAVGA

SEQ ID NO: 1004 - protein, 495 aa, synthetic construct
MSLKYAYGYIRVSTHDQEEISPDSQEHLLRDYAAKNNIVILKIFTDLGISGRKADKRPGFQEMIGLAKGPDHPVDCILVWKFSRFARNQEESIVYKSLLKKQHNVDVISISEPLADGPFGSLIERIIEWMDEYYSIRLSGEVFRGMKENATRGAYQARPPLGYKVIERGKPPVIVPEEAAIVRMIFDKYVNGKMNFFDIARYLNSLGLKTSHGKAFERRSIEYIIQNPSYCGMIRWNRMENATNRIKDQDEWIIADGMQEAIISKELFDAAQERLKKIYKPVGKRPSSTYKHWLSGLLKCPVCGRTLTATTMKRANGEKYAYFSCYGYSKGKCDKPHGVSSLVIEKEVLKALEEALGSNSIVYEMREIHPQELSNERTLISERLASLKGKEDRIRASYREGIDTLEEYKENKALIAKERDSLERQLAELEENTPDKIPDDPTPKMLDRVSSVHDILVSDSYSLVQKNEALKQIIDKIVYDRESDTLKIHFFLYHS

SEQ ID NO: 1005 - protein, 528 aa, synthetic construct
MKTAIYTRKSTLKVGQKETIENQIKICKRKAKELGLVIVDVKTDSATGTDDNSRPEVKELIKDAINGNYQCVIMKGISRLYRKTSKGLELIERLDQSGIRVVTVEEHFDSFAPENRTGTGKLDLSRLTMYLMFAEMESKKLADRVKYTQIEKAYAGEWNQPSSVPYGYEYVPETKKLQIKDSQADIIRLIFKLYIEGMGMKSIAHYLNGNNQDKIQYPSPKSKRWNEYTIGFILKNEVYIGSVVYNKRSKKERPYKNPEAIGKTTEDIYIGNDFNDKDKWITVKNAHDPIIGEDTFSKAQEIMGVKAARKGIRNNVSLFAGVAKCGKCGHGMTFKRGKKNSDGKVVTRNNYYCMNYIRYGSQYCDSHHVRAEDLEETIFNKLDELRNNKEQFDQIFNDSIKHIDDGSVSDDKEMKRIEKEIEQVAKKMDKLLEKNMEGKINDNQFELFNKRYSDDLDRLTSRLEEIKLKSQNNIDKELLLKSFRNRLDEIADYRNKSLEEKRYTILKLIDFIIIEDGIIKHLQFNFSY

SEQ ID NO: 1006 - protein, 333 aa, synthetic construct
MSSTDLIPAELLARKAVVYVRQSTQSQVMTNLESQRRQYDLVDIARQRGFGDIEVIDDDLGRSASGTVARPGFDRLVALLCAGKVGAVLCFDASRFARNGRDWHHLLELCGLVEARVIDHDGVYNPCRPNDRLLLGMKGSISEFELGVLRARMLDAARSKARRGELRLSVPFGYIWHREAGLGLDPDLRLQEVIRSIFTRFHELGSARQVLLSMTKDQVHFPRPSDEGRMTSFVWTPVRYRNVIGILKNPFYAGVYVYGKSEKRTAIVDGRARRTYGHGKPAGTWEVMIRDHHEGYITWDEYERNQQQLALNNYGRSGGPNRAAAARRYYRVS

SEQ ID NO: 1007 - protein, 537 aa, synthetic construct
MKKLKENDIYKIIDTLNQKETKTAVGYCRFSSDHQREESIEAQQRIINDYAKRNNYKIIDWYIDRGVSGKTVNRPSFQKMLEVIASGDCNFNSVIVHKMDRFSRNSGDAIKYKDILHDYGIELVSTVEQIKDDAQGRLVYGIMSTINQFYVDNLSTEVMKGLRENAYKCKWNGGKPPLGYNVENGKLVINESEAIIIRKIFEMSADGYGYNTILRELNKCGYKTKYGKPFGKNSLYELIRNERYYGCYIYNKCAKRDSQNKRNSHKYKDESEIIRIENGNPAIISKELWERANMSRKITTRTNSKAKYPYLLSGLLYCGECGAKMHGNHRKYGPTGYNTYRCNKQANQLNCACKEIRSDTLEQFVIDTLIEHFFSPNIIEIITEQINDLIKEKASTENEKTLTAKSTLKGLETVRNNLVEAMAQAGYNKAIADKLESTEKQIEEYTRLIAEEEEKEKNTSSVSKADVEDKIKTLRSAMLDIRNIEKTRLLLHSYIDKIIIDNISVKVTFKVTFSVFINGNTETVTYEHIEVKRRKEL

SEQ ID NO: 1008 - protein, 560 aa, synthetic construct
MTFVQNKKNGKPDYLEIQWRVGEYNRLSKEDGDKPESDSIQNQHSINQKHIQYLRDQGEQILSVTVYSDDGYAGGNFNRPRYQDLLRDIESGKINCIIFKDNSRLGRNYPELGRLMEDYFPQKGVRVISVLNNLDSVKDPRGYSSAIVSFANIVNDDYIRQLSIKIKCTLAMKRERGEFTGNYAPFGYQKDPNDRHKLVIDEEQAEIVRRIFDWYEEGMSASGIAKRLNAMQIMTPGDFKIRDGCKSFITHDKNSPKTRTWAVNTVKTILTNEVYIGNMVQGKHKSVSYRSKKMAPTDESEWTVVEGTHAPIISEEQFAIVHERFARRTRVAPAQDQTYLLSGFVICARCGHTMNRFTSHGYVRYRCMTRIYAPDKCQCPTVKEDHLEQLITRAIQAEIRRLVDVKAVIDAARQIKTTSGAQNEYTLALNKAEKEKERLMDAEFRLYDNFQSGLLQEAEYRRYKDRYGQEIALQQSKIEKLNQSLLELKEARQQDDAFVAFFQKYGNIQKLDRDVLNNLVKKIVFHEKNHIEIYFRFAEESDKLYDLATVVQDDGIVSCV

SEQ ID NO: 1009 - protein, 521 aa, synthetic construct
MLTATIYKRQSTLRQHAKGDSNTRQTNSSDEYCTRNNLQVTEVLSDAGISGFTGENFATGELGFFIERVQAGEYQQGHTLVLEHLDRFSRADVDVAINRLTSITTAGVDIAITGLGKEERLLKKGMPLTDMLVVLLEFAQANDESAKKSERLKSVWVTKKQQAQQGIIITKRYPHWLDTKDGNFIIKEANAALVKEMFSLYISGESFMSIARILTDKDQDGSLIKFYPRSTTFKSTSVGAILKNHSVYGRLDTMDVNDYYPVIVSKEDFDLVQSIRYKKTNNQHTNNKYTIKSAAKKGVIKHLFSGLYICNTCNSSLQYNEGERAKLKTNPNWESLYRLRCMSAQLKSNGRCSGSYTLKARVIEQMLWEQMDNLMLYDAADEINTQQSIKKLGNEMASYDETFNTYNFMITSKYPVPTELAVDYKTASERVDLINQEIRTLEQQLKNTNNKSLLTYKELNSNDKRKQARRLVEHTIKSITVNWNKKPDAEFLVTLNNNQRYIIVNVDGKYKTVAKGLLLGF

SEQ ID NO: 1010 - protein, 573 aa, synthetic construct
MNAPATLAYSYARWSSAEQSKGDSQRRQLKAFQDYCERKGLTPAEDNFIDRGRSGYKAEHLSDTGELRRFLTAVETGAIAAGSVLVVESLDRLGRQEVDEAYDVFRSILRAGIRIVTLADSGEQEYVKGGGIFQILYSLIEMSRAHGESQRKAEMVGAAVANRQDAARKYKTPIGNSCPLWLKVKEGWRSYELDGTAYEERPERADVVRQIFRWAIDGYGKEAIARMLNSEPHKCPPFKADTKWKDKGQRLWGASSVDKILKNKATFGEYHPTTRQQKRGSLKGEKIEVGEPIAGYYPATVSVDTFYEAQAAIDGRRTAKATRQSTRYNVWSGIAKCEKCGSALHLVHKGVPPKGSTYLRCANSRRGVCKAKAVRLDQAEAVFRGMLLRLDALSLVEDSSAGIEKALRAAEGELVVARNRLKGLTERLEENPESDAIGRLVAKAEADVLPLEAKVEALKADLAAEQGIGWTEFLARLDLVSYEGRAKANALCKRLGVVVSIGASGYAVTKNGDFICVMDYREGEAGYLVASGFRGKFPVFVPISDVPDYAEREDADQARQDAETDEGQPAGKY

SEQ ID NO: 1011 - protein, 532 aa, synthetic construct
MTENNNRVCCLYRVSTDKQVDFTSNHEADLPMQRKACHKFAESKGWVIVHEEQEEGVSGHKVRAAARDKLQIIKDYARRGKFDILLVFMFDRIGRIADETPFVVEWFVRNGIRVWSTQEGEQRFDNHTDKLLNYIRFWQADGESEKTSVRTRTSLRQLVEEGHFKGGNAPYGYDLVRSGRINKRKHELYELHINEQEAAVVRIVFDKYVYEGYGPQHIATYLNNSGYRARSGKCWHPSSIRGMVQNLTYTGVLRCGDARSELMPDLQIVPQEQFENAQRIRNERSVRSTAEAENRLPLNIHGKSLLAGNAYCGHCGAKLELTSSRKWRKMADGSLDDTLRIRYTCYGKLRKQTNCTGQTGYTVHILDEIIDKAVRQIFSKMRGIPKEQIVTKRYEKENAERKNHLQDLQTQRNKAEKDLLALKTEVLACIKGESVLPRETLAEMITAQEEKLTELENLCEAASEELEKTAELMDKVSRLYDELISYADLYDSANFEAKKMIVNQLIRRVDVYRGYQINISFNFDLTPYIEGE

SEQ ID NO: 1012 - protein, 550 aa, synthetic construct
MSKDKEYLHIYTRVSTTSQKDDGTSLDNQRKLGEKKAKSLGMIPILHNEESASSSFDNFDNRPVLFQLLRKIEDGEVKNLYVYNSDRLSRNTITWGIIRQKLKGKTILYTETGKVDLDNKTEDFMFGILSEVSVYENNLRKERLYEGRRIKARQGFWYGGPTPFGYKTNKNKKLILDKNEHPWVVKMFEWYSEGLSPKKIKHKLDGNIPTRRGNLLWSYGSVESVLTNTHHNGYYVCYGEHIKCPRGVDEILYEKVQKRRKRTVRTTLNGDNKWKDESTNIRNLLVCGHCNNEMGGRTRQYKDKEKRVYQCVRHNKKWKEVSNNEPWKRQKYCSNNVSIDSNRIEDGVWETLLGIMKESYQIKEEFKEKQLSNRKKSNRQRDKDLKELLIKKEKIKDKIKDVEETIIKLDIERVGSREKESMIVKKIDLLQIKHDEFTTQLNDIEIEITSLKNKDLWVDWVNDYDRFINESIGSPRKEKIELMRKYIKNIKVLFDPETRLHQMDLELRLNLINDSLNYIDPKKKKKGYELKEGHNKLKVDMDYNVRNLRI

SEQ ID NO: 1013 - protein, 441 aa, synthetic construct
MKKRVALYVRVSTQEQKKHGLSVDSQIAALEEYCAEKKYTVVDVYNDAGISARKKYTKRPGLLRLLNDCEQKKIDLILFTKLDRWFRSVADYYEVQSILEKSKVPWQAIWEDYETITSQGIFKVNIMLSVAQAEADRTSERIRAVMEFKRKNREYLGGPVPLGYMVKDKKLVKNPETEHIVNDMFDYYFSTFSKYKTADYILQKYPEATEMNTRGNMQLLISNPIYAGAAYGIDGYCDAYITQEQRRKMQENSNEKVYLSGVKRTYIFSGLLRCSVCGARMGGTMNHGSKSYRCFNRKMKHYTLVRSEKKLEKYLLENLETILSNKIYVLEQAKEDTQNYKIEKKKLLAERDRVNLMFEKGRITEEYYDSRYDEISIRLKELEKKDDAQSEKSEKLKKYLSGNWKELYKQLDEQGKQAFWKNIIEIIIISRETFIEDIIFF

SEQ ID NO: 1014 - protein, 610 aa, synthetic construct
MSTKIRAILYYRVSTKLQEKKFSLSAQETELTRYAQQQDWEIVATFQDTDSGGKLDKAGLNALLDCVEEGKADIVLVIDQDRLSRLDTIGWEYLKGILRENKVKIAEPGMITDLANEDEEFISDIKNLIAKREKRAIVRKMMRGKRQFTREGNVWGVQPEEYYYDKTSKTLSLNEERSWIIPFIDRLYLSEGASAKEIARRLNLRTSTSKGKKWTENQVLLKLKNPCYHGVLRKTFSTGETISVPDVYPKLRTLIEFEAIQEILAGRRNRKPADPHILRNIEIKCASCGNIISVHRITQYSEESNYALMHTYEGSRDLCKAKPYVNTRRVEKSFIQAVKDILKNEKIAKQYIDPANYDNSQIKYLELSIKQYKKQVADIHLKKDRLLEVYLSGRWSIEKLDEEGAKLDKELEAIEKSLERDKNKISLLKANKLNYETVVSFLSTVANFDTWLLVEEQQKTIGMMFPSATLDIDNNVLVLNSLLPQGITLPINVPIQTTEEMVEERLFEKSKARYEACQKYLNDNPGTTLFKLSEAMHSNVSTLESDQKRFGKFKNLALAKGSNELRAKRLKILSSTLKKHPDASGRELEKLTGINRKTIYRLINEEGLRS

SEQ ID NO: 1015 - protein, 609 aa, synthetic construct
MTKIIGYARVSTTKQDLSRQKLKIKEFCENNNYELIEIIEDFGISGVVADRKGYIELQSKTYKDADMIVISELSRLSRQEDVTETVYNIQQIINKGLSVILLDSPSKIYEANKLLDITEILILTIKAWAAAQERLDIKKKNQDGKQALFQAYPYAVVDPKIPYGYKAVPNPNGKRPKYILEEVPEEVENIKRLFALVNSGKTLGAVARYFNERNITFRGYYSTVAILSNYIHSDIYRGIRRRTQRLGREEPYTIEVRIKPIISEEDFMKAQELIKNNYKNTPTGKVNHNPLKGIIRCRCGRAMTVKDKKPAAGISKLTYRCSCVDRKSHPDFCKYNIDEVSYDLTNEILYSLFKSMHTAEYINFFRNQTDNRVTELQEEIDGIEKRLSVLYLDKENLSNESQDNANKFLLTTNPTLLNIIQEKQNQLDEKIKSIDKEIIRYKKSQSKKMADIERIKDNNGKEKLQNLSIEEQGELYHKYLERVNYIPVTTMQGYYIVQFLNGIKFYIAITKVRSIAMASLLLDNWTIDEKGIITANYDTLKSSDMKNFSIEMIRKKKTMTLQEYLKSDLAKERALHLDLSYRERYLKELHKAGLDGRLRPLKKEYLHPF

SEQ ID NO: 1016 - protein, 480 aa, synthetic construct
MASKPNQELETRFRVLYIRVSTEAQAEEGYSIGAQQERLEAYCRAMGWKNYQLYIDPGFSGSNLNRPKMQQLIADVQAGKVCAVVVYKLDRLSRSQKDTLYLIEDIFIPNDVAFVSLNENIDTGTPYGRAMIGILSAFAQLERENIYQRTRMGMLERVKQGYWMGGGGVPYGYDYDRNQGILVPNPQQAEQVRKMYDLYLKGYSAQKIANMLGLHYDKIVTQILTRKSNTGVICYKGEEYPGLHEPIISEEIYNLTQIKMRERSEKSRVPTKGTHLLAGLVYCGECGARMRYVKWGKNGYKLYCYSKDNSKPHMKRADSCDSEPCWADQIEDLVIQDLFNISANLERSTKDDTAPPVNPLQELESQIAQTEAKVKRLYNLYAIDGNDMLLDTIEENKRQLALLREQLIMEEETRTRAKHIDLVRERVVSIRSAWGMLSMQERQTVLRDCIDRIIIHKNKVEIFYTFLKDKGKAGTAKYVA

SEQ ID NO: 1017 - protein, 516 aa, synthetic construct
MRKIWNVAIYARVSTDKDSQSESIPAQVGNLKKWLIEKSTQDKEAVYNLVNIYEDQGKSGSNFDRDAFIRLKQDIEDKKINMVLTRDLSRFSRDYIMAGYYLEDYFKVNNVRFISVLDNVDTETEFNDIIPFKNILNEMYIKDCSKRVRSALGDRMQRGSSIASKPPYGYKFEELYEGNQKTIILVPEGGETTEVVKEIFHLYQKGWGFGRIATYLNKKGILPPSARLKNFKRKKFGMWTNNTIQSILKNPKYGGYMVQQRWRKVSYKIKKVKATPEEEWIWSGEFDGIIDKETFNKVQKNMEQRKHGYRYKQDRIYPFTTVLKCGGCGGSMSYRKKYKGYKCTNSQIGGGRCTPHSIKEDYLIEKVRIYIKSVIDICIDKDKYYKKVDGIVIENEFEKELSKVEQELSTLDGKFQKLYEDKLNEVISERNFSNMSTTIQTKQESLIKRKKELEEIVQNNNSDIDITKIYRDEIDKLLSLNEIDRNFVEALVDKIIVNEDKEMKEKSVDIYFKFKK

SEQ ID NO: 1018 - protein, 520 aa, synthetic construct
MRLVFANNLNKQKTNENSSIETQCSKNLKVAILVRVSTAKEEQKSSLDTQKKIFTRMCEENNWEIYDIYEEVESGTRTNRKGLNQLINDAKEGKFNLILAKELSRLARNVPLAYQLREILNKHKVHLKTLDGAIDTLNGDLDKFGLYAWIYEQESQKTSNRLKQTFRARAKEGEFNGSEPPYGYYLKDKKLYVRDDYTPEVVKRIFNMYLQGKGFDAIARQLYNESIPTPAQLKGKSNASDKWHGSTIKVILTNPHYTGTLVQCRDTKPSVTDKRQPLPESEYVIIENAHEPLISIEMFNTVQELIISRSRIRPQAEVHLFTNTIFCADCGRGMHFKKNRKGYVCGNFNKHGSKACSDHFIKERELEEIILNDIKSIEQQMDLDGLIDRVIKQLESDTKNNTNRLSQVEQNIEKLKKQKVQLTSLLADNSIDIEEYRLTIEEINKKINDLMSDKLKLEKSKDQSKRERKNMKKLKNELKEYIHFNKLTPEMLHRLVDRIEIKEDGSPKIYYRFANDFLNE

SEQ ID NO: 1019 - protein, 570 aa, synthetic construct
MNVMKAYLYCRISSGKQKDGYGIQRQSDAVLEYLSNSKEAEKLGYKLSPDHYEMLDPDLGKSGYHGYQFTKGALGRFKQRVADGEIACGALVIENVDRFSRAEEYTASEEFNFLIQRGIDIHEVETGIVYSSKISGTLSKLSHAIERAHGESERKSRMASKSWSNRHKKALEQGIALKTNHPRWLRIVDDHYEVLKEQLAIYIIIFERFLEGHGIAVLLDYLNENGILNNGKRWTRTSLHRILRDRRLIGYNKDNRIYPIAINEQMFKRVQDHFDSQDGSTKRRTTRKMRNVFNGMTKCGVCKSAMIANKNPHGKHHLYCVKKRGDKHACSASACRYEYVEKEVLKHLHNIDWNSVYSNKNKVSVDVQGKNTQLIDLARRVDELQKEMTGADHDMVLALVRSLKILRKEHQELKDELTIISTDVKPKFNFDISEVIEQKNVSLRQEINVLIKKTVHKIFVQKFSGHIYVNVEYYNTVLSHMLVLENLTGKLLANIAIIDTSNELRISSNGFSIWHDKTKDIWNVSDFKAIGSRDFFLALNHMSQFVDREVIDDLFDMWEMKSLGSVENMV

SEQ ID NO: 1020 - protein, 490 aa, synthetic construct
MRAAIYCRLSEEDKGKADGADSGSIQNQKMLLTQYADAQGWEIYDIYSDDDYAGADRNRPEFNRLLKDAEAKNFDVVLCKTQSRFTRELELVEKYIHGLFPIWGIRFVSVADNCDTDDPGNKKTRQINGLVNEWYLEDMSDSIKSVLNSRRSLGLHIGSSAPYGYAKDPAQKGHLIIDEEKAFTVREVFSLFANGQGKTSIARELNARGIPSPGGGLWQYATISRMLQNEVYIGHMVQGRYGSVSYKTKRNMPKPPELWFRVENTHEAIIDEKQWQTVQRLISEKSRPFAGNKAGAFAGRVYCACCGSPMRSARSHGESYLRCSRRYISKAACPGGFISVKRLERTVLCELNQLASEHLDADMLKERCIQCSSSRQMQLSKRISKLQGRIDMYSEAMAKLYLHRAEGSISEADFSDTLKRISSEKQRLMHAAARGTAELKQISPSSTREDIPVLLDALNNAAPGALIERIYIGRRSPGSWEVPVEIHWSF

SEQ ID NO: 1021 - protein, 467 aa, synthetic construct
MPTDPADPQLACIYCRMSEDREGGGLGIDRQREDCEKLATELGLTVVHTYTDNDLSAYSGKPRPGYQQMLDGLRNGLYGTVIAWHTDRLHRRPTELEEYIDVCEPRRVQTRTVKAGTLDLATATGRMIARQLGVQARYEVERMVERQRRAREQKVGRGEWSGGPRPYGWEEDGVTPIPEEIAVIRESAEAILAGASARSVAADLNLRKLPTSTGARWEGGSVVRMLKRPRNAGILQHRGEEAGRSKWDAALDEATWRSLCDIFADPSRVSTAHNVRKYLGSGIYQCGVCGEALTSFFKRKGEPKKYKCRKNSCVVRDLVLLDKWVQTHLLKRLQRADAADLFAGREQDPVDVRGAQEDLRAARKDLDDLAAEFGAGEIDMQEWRVARASARARKEKAEAILATAVQVNPVVGLLGVEDVEAAWKGLDLSRQRAVIDWAMTVRVLPAKTGRRPGGTYWDRDAVEIAWK

SEQ ID NO: 1022 - protein, 522 aa, synthetic construct
MRGTTMDEIERPYDGCGKCLLGVRRLSRVKAATTSPERQREDVLTAAAAIGGHIIDWADDWEVSGATDPMTRPKLGPWLRDERGKYDGLVAAAVDRLGRNVVDCLNTGYKMRDEGKLLVSYGHEGVWDLDDPNDENRFTMEAWGAQMELRAIQRRNRDATRKIRAAGRPKGKPSYGFQYVRTVPNGRVDRVELHPHAAEVLRTIARRILADPENVSVSSEAARLNRLGELSPADHLAVMYGKQAGGRPWYPTSLRNMLLSEAAMGYLVHQGKPVIDRTGNPVRLCEGLWNRTTHNALKEVLRAGDTPYRGRKSNRSYLLTEVALCGQCHNRLFTQTSVDAPPRYACTVRNKGWKNAQHCRPAPNMRVANLDALVEGWFLEKFGHGAIVETVYDSGNGVADRIAEVQSSRQRLRADREAGLYDQPDDAEWYRERYIELSRELKELESEPQRPPGMVQRPTGETVEDRWMKAPDVQARKEILLDFGVRVTVFPASAPVRWVPGILHGPEQDPLSLSGSFRTAGS

SEQ ID NO: 1023 - protein, 486 aa, synthetic construct
MKEYCMYLRKSRADVEAEARGEGETLARHQNMLIELAKRQKLSVVKIYKEIVSGDSIAARPQMQALLADVTQGKYAGVLVVEIERLARGDTIDQGIVAQAFRESSTKIVTPVKTYDPDNEFDEEYFEFSLFMSRREYKTIKRRMQVGRLASVKEGNYISASAPYGYRKINPEPKVHTLEVVPEEAEIIRLIYRLYLDGHGAKFIANELNRMGVSPQKSAFWEPPSIKKILSNPLYCGFVGWKSKSNGDTLYKGIHEPIISEETFNNAQQKKRTAPAVQLRPNAKLKNYYHSILYCKNCGHQLKRRLIASSGQEHMLCVHSECRGKIVSSAIEAVDEAVIAALRYRIKQFENLKCKGTSEFGSQPNIKAALAAELEKARRQLLRLYDLLEQEVYDKETFIERSEIVNDRIKMLEAAVMEAEREQKPALLPDKAVKRLQYVIDNFESSDAEEKNRLLHTAVRKIYYCKTERMCRNKPFSDLSLSADFL

SEQ ID NO: 1024 - protein, 427 aa, synthetic construct
MREFDQRPTAYSYIRMSSKRQIKGDSLRRQLELSKKSAEDHNLRLDESSMVADKGVSAWTGANLTEGEFGQFLAAAKAGHIKPGSYLLVESLDRLSRQQVRTALLPFMELINADITIVTLADNQVYSKATVDANFTQLIISLTIMARAHEESETKSKRLRAVAKNRRENAANGVGRFSPMHVGWIDSERVGNDRWTFNLNGHANAVRRIFALADSGLGQVTITKRLNDEGVPTFRGKGLWFPANVGRIMRDETVVGTYQPTHVVEDVRQPFGQPIKDYYPAVVSEELFWRVQRGIKVGFAKDEFPFGEAVLRCVFALGFAFSDVKTALNPFGHSPVHGLHFFPEHRFQVALVRAENRNLNLIMRDERPPRKDGHREGLAETSSASKRNSFVVLKCSDKLNLLWRKVGLENLFHKQDRVFSPSNNCCL

SEQ ID NO: 1025 - protein, 567 aa, synthetic construct
MNTIQCRGHVQYSLNKNIVSHFLGTCTGVIFIRKIVRRRTYILRRVIHMQQYEEYLIYLRKSRSDASLEAMGVDVLERHEQILLDLTKRMNLSIGGIYREVVSGESISARPEMQRLLSEVEAGRWKGVVVMEVERLARGDTIDQGIVQRAFQYSGTQIVTPAKTYNPNNEFDEEYFEFGLFMSRREYKTIRRRMRAGVTAAVKEGKWPFNKAPYGWQRVKLEHARGWVLAPDPEEAPVVKLIFQLYTGPDRIGITNICRYLDNRGVKPRNGDTWTECSIMGILRNIVNDQRVGIGRRKIVKQVQNGSVSKVRPHSDYDFTAPGLQPRLIDHDVFLEAQTHLGKNSHKLPESYGIKNPLAGIVVCPCCGKKMMRRPASKTPGGAPYDVLKCNTRNCPTIGSALDLVEREVIQALSDWVAGYQLDPTLEVENKVPEKEQLLSSAISNHDVLLKQNGNLYDLLEQGVYTTEIFLERSHELQKRIKESEAHIEILKKDLEYEKEKIANVENFIPSCKELLSCYWELSAQDRNKALKMLLESVEYTKTKRNQKGDKDNPTFTLNLKPRIPRI

SEQ ID NO: 1026 - protein, 654 aa, synthetic construct
MALIPYARVSSGKQIDGLSLSLQNDNALLEQLALQYGTTVSHLFYQDAGVSSYKGKNASVGELSRLLADIESGLISSGDIIVMRALDRLSRQNLTASEVLYNRIISADVMIHTTIDNHLYKMDDPMSSILATLALKTANEESAKKSHLTNRYASHRIQQAKDGQKLDGHSFDVGIGRHPFWITIDKPTKTVRQHPINWDHAKRMIALALDGYGVSTVMRYAHSVGLELSYSACAKMFNTRAVYGVLEITHQREDHVLIDYYPALCSESEYYQIRAIKDAQTKVSNNQRKQVSILSGIQKLYCGCCGSVLCIARNVTQKTEYYRCANRLVKCYPYIKQEYLDRIVLTAIGEKVLSSQLMDNGHDKTLQGIELELETKVMEYQKQQTFLFDNLDLFDDTMKSLLAAKKQSIAELESKIEQLKLENAKTNAIHNIDLSQYQYALDLYHQHIDCLERYIQGDNDLKSEIRHIVSTLVDRITVDSRYMIRIQFKDGSTSYYMLLRRRDGKKVHQRNYARIQIVSDSDYNGLISVYPELDSVTSTELLIDSHTTFLEDVVNPIPLGNVYVKPGTKVEAFFNLLVDDVYEWKRKSIMAAGATCTQWQDYKDSDVSLYGWTKVEVELTTKYYTKRTATLIHRNGLQLEQVAMDLGVHKVKIK

SEQ ID NO: 1027 - protein, 535 aa, synthetic construct
MEPDLRVAAYCRVSTEQEDQKSSLASQRKYFADYIKQHADWSLYRIYYDEGISGTSVKNRTGFNAMVADAENGKMDLILTKEVSRFARNTVDTLTYTRKLKNMGVGVLFMTDGIDTRDPDGELRLSIMASIAQEESRKTSVRVKWGQRRRMEQGIVFGRDLLGYTVSDGKITVNPKESPIVKLIFHKYLDEGKGTYVIARELREAGIQPLHAKEWSSTVILRMLRNEKYVGDLCQKKTYTPDYLTHAKKYNRGNEEVVYLKNHHEPIIDRETWDKTQEELKRRSPSEARRSKHSNRYWCSGKVFCGVCGQRFVSRTKRLRNGQTYKAWRCYAAANHGQKKTDIAGNSIGCSSESVNDKVLRASMAFVISHIQSDRESIKKEMLQEIKSVQSCSTKIDVAPLDAQINKLQEKKQKAIDLVLEGIISKQDLKQQNAVYDNEINRISEEITKAENQNQLQQEQIKSIESYLESIDRLLHIAADNEALYHELLDKIVINPGHQITVYLNCVPFGIQLHYKTTGRTNNFRVTIDKAKVLN

SEQ ID NO: 1028 - protein, 447 aa, synthetic construct
MKVAIYLRVSTQEQVDNYSIEAQRERLEAFCKAKGWTVYDVYVDAGFTGSNTDRPGLQRLLMELDKVDVVAVYKLDRLSRSQRDTLTLIEDHFLKNKVDFVSLTEALDTSTPFGKAMIGILAVFAQLERETIAERMRLGHIKRAEEGLRGMGGDYDPAGYKRQDGRLVLVPEEAQHIQEAFNLYEQYLSITKVQKRLKELNYPVWRFRRYRDILSNKLYCGYVQFADKHYKGQHESIITEEQFDRVQILLSRHKGRNAFKAKEALLTGLAVCGECGESYVSYHCRAKGKHYRYYTCRARRFPSEYPEKCHNKNWRSEAIEKFIQDALYTIADEKETSEREFVAIDYGTQLKKIDQKLERLVDLYADGSIEKSVLDKQVTKLNNEKRDIAEQQAAQTERAARSVNRKQLQDYAIVLESAAFPDRQAIVQKLIRRLAIHKDRLEIEWNF

SEQ ID NO: 1029 - protein, 505 aa, synthetic construct
MNTLALYTRASNEDENLGESATIQNQRDLLYHYIRSKQEFKDWNVLEFQDDGWSGTTFDRPGIGKLLKLAGKEVQCIIVKDFSRFGRNLIEVGNYLDQIFPFLGVRFIAVNEGYDSNDNAGRTIGLDVSLKAMVYEMYSRDLSKKISSVKEEQMKSGHYAGSFAFYGYQKSKDSKSGLEIDPEAAGIVKRIFSLAASGVKTLQIAVLLNKEGILPPLSYRKQKKMDEHFQCPTATEHNIWTQARIAAIIRDERYTGVLVSKKKQRIDISTKKIKLNERKEWIRVENAMDAIVTREEFGQAQEALVRRGNRNKVTPSEPFRGLLKCGICGKALDRIDCKNPYFRCVTGRFEPDSLCAEIRIERKELEQTVLSALKYQIQLMQENKPSDKSGSETTIRQNLEKIDGQMGKYKSNQMIQFERFAGGLIDREQFIMEKKKIAEQISALQAEKEELFRQLQNVEQLAQVEEHDLGRYAFVETLSRELLVALIQEIRIQSDHVIEINWNFR

SEQ ID NO: 1030 - protein, 532 aa, synthetic construct
MRLSVMNKPKAIPYIRFSSLVQGNGSSVARQQDYINKWLKSNPDVLLSNLQFKDLGKSGYTGKHLKNDLGKLLVAIESNHIKAGDFILIEAMDRLGRLPELEMISIIQQIISAGIKIVTLQDNTEYSTESIAANSGLLYVLVGKVQGAHQYSKSLSDRLSKAWEDKKRKAIEGQGVKRKTPWWVTWNDLTKRYDIVTEDNKYILKSIYNLYLNGFGERRILNRLREKYPDKFGTTDPASVKRWLKNKTAIGYWGDVPNVYPSAIPESLFYTVQAELKNRGAGKSQTPRSGRFLCGLVKCGCCGGNYAIRSNPHSKDAMLCSQSNKRKDKCNNKKTIPYQVLDWVRSQTYLDALARIATRSQKTDIDEKLIVIDGELESLKSQRDNLLELGSKVGFSDSLTNKYTTLEEQITKLEISRVGITQTIIEPEDIDSSMLPELEYDLFEDVEAFGQLLQKVGYKMVVKGRKIECEGTVFEYLKWSRTNDTYHILINGVDFVELSVMRDVTDEEIKDMQETETNSFLITEDNVCDFIL

SEQ ID NO: 1031 - protein, 518 aa, synthetic construct
MKSNSLPRPKAYSYVRFSTPEQSRGDSKRRQMEKAERYALEHGLDLVDDSYMDLGVSAYRGRNKDAGALADFLQAVEDGVVEKGSYLLVESMDRISREKPRKATRLLEDICESGIILVTLGDGKVYDISTLDDDPMAFMWAFMVAMRANEESETKAKRVREAWGRKKASAAAEGKPMTMRVPAWLALKTDRTGFDVLDDRAAVVRRVFREADKGIGQHTIASGLNKEGVETFGDGARKAAFWHRSYVAKILGNPAVIGTMIPHETREVSGKKKRDALAPIPNYYPAIVPVAQFNRVNSRKDGNNTPRMRASAGEVSNVLAGLASCPSCGATMTRVNKGRKNGTPYLVCTKAKAGAGCQYRQVNLAEISGAIQHAGGRQLVFEVPSGDEGLDEERTSLQKAWDGVSNAIENILTEIEGGNASAALRRRLSGYETELASVTGRLEAIHERSKRASGRAIGKLVASLEKVLTDPAATVTEINTVLRDAFARCVVDYRAGTLRFFWKHGGAPTEIPYSIETD

SEQ ID NO: 1032 - protein, 483 aa, synthetic construct
MLVSMRVLGRVRLSRTTDESTSVERQQQIITQWAEGNNHTIVGWAIDVDVSGSINPFDTPSLGPWLKMPKAREWDILCAWKLDRVARNSIGLHKVFAWIQENDKQLVCIADNIDLSTWVGRLIASVIAGVAEGELEAITERNKAANRTLRANGRWQGGAPPYGYRIKDTGHGKVLEKNPDEWGILKQIIYRALAGESINSIKNWLVQSGLPTAAKSRYGKDSTWTASVVRGILTSKHLLGYQTLQRKPVLDAEGKPILVGPPLISLETYSKLQEELSSRTLATRNVSSGNPLKGAIKCGVCGGSMALRSREKVTGKFSGSYVCLNDNCTNKTIHAAKLLATVSELLEEELGQFEIMEKHTEYAGDTTLQLKEAEESYKEVAEFLPNAPSKEARQVILEQLQVIGKRINALKQTPMKDTTTWKPLGKTYGEAWKEADNIGKQKLLQKAGIIIKATSINSNTGPKPGIFHTELIIPPDLRQRLGK

SEQ ID NO: 1033 - protein, 502 aa, synthetic construct
MSAQLKRLPTAAPSRAIIYLRQSTYREESISLEVQERAARDHAERNGYEVVGVESDPGISGRSWKQRRGVQNALAAIEAGKADVVVVWRWSRLSRNRRDWAVAADMADLAGGRIESATEPNDQSAAGRFARGVMTELAAFESERIGEQWQEARDHRVARGLPSTGGARFGYRIVDRAYVPDPETAPVLAELYRLYLAGQGSTRLAGYLNGTGIPRTRTNRPWGYSDVFDLLDSGFAAGLLVRTPPRPKNQPTASAPRARVWEREFREGSHPAIIDRATWDAYVAARRERTRARSRTDARMLAGILRCLDCGGPMHHNSWKKGRMYVCSRGSRYTGHRQVSVNAQRVEAAVEAWVLAQAADLTAIAGAVERTEERGARIEMTARRAQQQIERVEARLTTLALKLADGTISDAAYRLAAESLEAERKGATELLQKSARNPVRDSAPLGLSRDLARQWPGMTDGVRNALLRPLIAYVGVRPAKHRGDRSERWVIVPSWDAETDEG

SEQ ID NO: 1034 - protein, 546 aa, synthetic construct
MKVAIYSRKSKFTGKGDSIENQIQLCKNYAFTHYDLKDEDILVYEDEGFSGGNTDRPQFQLMMKDAKKKKFDLLICYRLDRISRSVMDFSNTFESLEDNDIGFVSIKEQFDTSTPMGKAMLYISSVFAQLERETTAERIRDNMMQLARTGRWLGGQTPTGYESQQVTHLDHNGKERKMFKLSPIPKELETVKIIYDKYMELKSLTQVEQYLIVNNIKTKNNLDFRRYSIRFILSNPVYAIADEKLYEFMMSNDYEVCAPKSDFTGNFGVMAYNKTKQNKKSSVEARDVSEWIVAVGQHEGIIDSDTWIKVQKMLNRNKSKSFRKVKSTTSLLSGLLYCADCGSYMRPKMGRIDKNGQQIFYYMCEMKEKSKRTRCSMKNVKGNDLDKLVIEEIKRMAHDNSELKGNLQSDKLQIETKQNTIHNEIINLETNIKNNEQSINNLVSSLSKSQESAASKYIIQQINQLDKETAEMKERLLKLKENEENNNMKDNSLNVMGDMLAAFNDNIDEVDIEAKRMFLKSIIDKITWDGEIIKIYMFGMNTEKKL

SEQ ID NO: 1035 - protein, 504 aa, synthetic construct
MSQSGTVRHQLIGAADYARISSDPGNDAKGVARQTEDSQARIGREPSWRHVGSFVDNDLSATKGRERPEFERLMAAVRRDEVKVIVIYMTGRFVRTRRERMETYELLAKHGVRLVCTKGPDLDFSTPAGRMVAGIMXEVDAHEVEQLATRVSDSHLQAAKEGRPIGGRCYGYRPDPTAPKHHKRRLIVSEEAAVIREMAARALRGETLYSIVQDFNERGVPTLHPGRSRTGGLWSVSVLRDILTNPAIAGRSVLLGVDYGEAEWEPIISYADHLKLVGMFSGRTAPEGWTNRHVHLLSGIALCGKCLAQGREITVTCRPGAKPTPSGYQPWPKSRGYICPDKQRGGCRGLRHAADPVDAYVEETVVRLLGEPGVIDNLVAAEAPDAEEVLKVATEIEACQARAAAVGVLMAKDDPMDEVTAIARRAALDQIRDDLTRHRQRQTALARSTVAEGLLDVEDIAHHWEHVMTLSQRRATISALVRITLLPIGRGKRGTTDHVVIDRR

SEQ ID NO: 1036 - protein, 474 aa, synthetic construct
MKVGIYSRVSTQEQAREGYSIGEQVERLKNYCAAKGWILYKTYTDAGFSGANTDRPGMQQLISDVADGKIDMVLVYKLDRLSRSQKDTLFLIEDVFIKNNVNFASITENFDTSTPFGRAMIGILSVFAQLEREQFRERSIMGKDARAKEGLHHGGGAPTGYDYIDGQLIINKEEAELIKEAYRLFLEDDMTMMGIAAKLSVFSEKFKYDHRIRKMLTNPLYAGWTHCRDELYKGQHEAIISQEVFDKVQTKLKIRAENNPHYRNAFNRTSLLAGILWCKKCGARYFKRVRRYEKGSKVYYYNKYQCYSRSSYKNMVRDKSCKNKIWTMDVLDKTVIDEIKALVANPAEVDNIIKLNQSNNNITEKKEFYKKRIKEIEKQMNKLTDLYSIDGIDIDFVAKKITALNTDKKRIESEMNAINEHKPLISAEDAKKRLSGISNILDNGEFTEKVKVITSLINRIEVDDDDIYIYWNFV

SEQ ID NO: 1037 - protein, 579 aa, synthetic construct
MTKKKAVLYARVSTEKEEQEQSLEIQEEIIEQFCNDRGFNLIKPHYLEHGKSGTNMKNRPRFIEMMGDAGLKRVPSATKDTFFEDSGLSPIFDIIIVKEASRFSRNQTEALAVLKELKSKGVEVYFISTNTSTTDNNWEFDLGLYFNISQTESKNLSVRVKMSKRHNAEKGKYAPAIVPYGYKRIFDENGKKKIVKDDNEAQVVEYIFKQYIELGGHTIARLLNEQNILTKSGKIWSNDKITRLIQNPIYIGSPVVMKTKKINVTDTKRVPTTENERVTVKDAVEPIISIEDFNRVQSIRADRTTTATVKKRGQHKSKTDIFSGKLYCANCGAKYVRHIGEGKKINYMCQTRRKHGLEKCQSKGIAFNLIMQGLDDCKLFFNGLGNHVQLIAINEGIQKLNVKNIEIKERIMADIDKIKEDERNTFLFMRGLDKFSRTYELANEELETLNLKRIDLEEQISLLKVETIQRFIAKVKQKENAIYEARKMEMNEQDLKLLQLHKVVIDDDSVKYYYTVQAFDEEIEEFNRTFGDLVEPISFQSEEHYEERFQRDFRKLISRAEEQEMMQEQYEAMEDLGLI

SEQ ID NO: 1038 - protein, 453 aa, synthetic construct
MGWAIDVDVSRSVDPFDTPELGQWFKEEKLHDWDKVVCWKLDRLATGSIYLNKLIAWCGENNKTIASVTESFDLSNWVGRMIANVIAGVAEGELEAIKERTRGSYNKLLETGRWPGGTAPYGHVPEKTNQGWVLVADPPAVKVIDRMATQAIDGNSIDWIRDELNHDKITSPADRWRELKGLEPKGGEWNSKAIWNTLTNKSLLGHATKEGETVRDAEGMPVLYGDPILTRERWNELQDALDKRRQGPQRTRSTSPGLGVVFCFDCSGQLMHKQMKRDYGKTMYRYYHCINKDCSNMTMMLAEQIESMLEESFITDLGDEQEVKRIFIRASDHSQDLAEALEAADELATMFSTVKSVSMKNRLREQMAALDSRIATLEAMPIRPAGFEYQPTGRTYGEAWADAHTPEDKRQLLLKYGIKCRVAQRSRGTGTNQAGVWDWDMDTPEDLTARMAS

SEQ ID NO: 1039 - protein, 497 aa, synthetic construct
MPNAIIYTRQSKHRDESITHENQEDACRKYAASKGYDVVEVVNEKGKSGRTIDKRTEFRRTLKLIEDGHAEIMLVWRWSRFARNTLDGLITLKSVEEEAGGKVESALEPIDRSAMGKFQLTILLAMAELESEQKSEDWKSYLNSRLDSGTAPAGRNYFGYRRVMDATGKKHVGYEIVPEQAEAIREAAKRVVAGHSLRKVAFWLNEQGFRTTQGKPFVSIQVRRVLLQPFVRGKIGWKGKEVDGAHEAILSEGTYRKVAAELSDNTMPRRSEVPSSRLRGIVECAKCGRKLSYQRGHNKDRPKAPSRFRCPTRVSKGTSICDFGSVLAEEVGNALAWAAQRRWNDVEKAVPQQDVQQKLDDKRAQVDSLQHQITQMLLTAQAAGLSTEQVQEALTTLREQSETAQTELSELEAAALTQARPWHEIEDVIHGDDVGAANATIKQFVRRIVADAETLSIEFVEGLPYVWYLGSGPSPGAKDRFKDYADKQGLTPPIPEP

SEQ ID NO: 1040 - protein, 547 aa, synthetic construct
MVQATTVSPPKVVRIIEPTIPIHETVKTTYRALRVAAYCRVSTKQEEQLHSYETQVKHYTERIQAENGWILEGIYADKGITGTSYKKRDEFNRMIRRCKQGKIDMIIVKSIARFARNTVDCLKFVRMLNDLNVVVYFEEQGIYSNQPGAEFYITIYGSIAQSESENISANVKWGKARSAKEGNVPFHYKNFLGYRKGADGKPEIDPEEAETIRFIYERFLAGDSLSGIAQKLNDLQVPTPSGKGLWQNSTIQSILSNEKYKGDAIINKTYIKDCLSKKVMVNNGERPKYYVENNHPAIIDAVTFGRVQEELARRSGKPKTKQVGTKTEQGKYSSKYAMTELLVCGECKTPYRRCTWTVKGQKKIVWRCINRLDFGKKYCHNSPTVEESILQRAVMRAIMETAQQNLGVLQTLKVHIGMGLQSEQTEDNSMELQIRIAEIDAEFKAMLAKISTDTVDAFDEEKAKRLMDEKARLQQQLGNIRDGQLKREQTQSRLDDIYTILDGLKNRPMEYDEQIVRQLLECITVDSKEQITVIFVGGLKVVQPLID

SEQ ID NO: 1041 - protein, 576 aa, synthetic construct
MKLYSYQRWSSAVQEAGTTKARQEDAARAYALRNGLEYCEIVDSGVSAYRGANKQGALGKFIDAVQQGVIERGVTLYVESLDRISREGINNALRLFQDILELDITIVTGMDGKVFTKQSINDNPFDLMLSILVFIRANEESTKKSLRTNGNALALVERFKSGQSTNIKSMGGCPFWIDNSMSQYEAVKKDPKYWPIAEEIVQQFLDGKSVFQVVKYLNATYPEGCYGKPWNYANVRKVRLSKAIYGVKEITINGQKYTLDNYYPALCTEGEFLRLQIIKDNNKYIGKVGDQKNNINLLCGMKLFRCGHCGSTMMAMKHKNTIRYMCEKGRMDSNGCRLWSFGSLGIEHCLMLVLTYAYVDKNRKGLQNKTDYSTRIASKNEAIDEISKRITNTVELVSLGLSNVEEVKVLIEGLNKQRTVLKTELDVLVTQQALSDSIDFETLMHDFFTHAQYTVLQSVDHEYREELRKVVFAMMDSVIAWKYGKNLYFSFRIKDHDEYFNFVPGEAKNTYKLFIGGLPFNDEPEDDVALGKSLEGLVKAYRTVTEAQVKVIKMAGGMLEVVGYPVLDGKHFWTKK

SEQ ID NO: 1042 - protein, 557 aa, synthetic construct
MHNFSRVYAYLRFSSDGQSDGLSFERQRELAYQWTRAQGLPDSAVEFIEDPGRSAYSGAHLSKGELGLLLKRLKETRREGNELLLFEAVDRSSRQGLFLFSSMIADFLKTGIFIHFLGEASPFSLSYPADSLLQLKLGIYASLAQQESARKSALSGNNWRSKRKRAREANDENAVVILTRECPRWLKVVNGKFVELPKQIEAIKGVFERARDGWGVTKIVRHANENKWAAPGKKGTWHNSLVNRLLENRALLGEYQPCVRINGKRVPEGDPILGYYPKVIDQELFYAVRGIRSTVSTFPNRRDKNNYNYLQGVAKCHCGGSWRRLNKNSGKQAGYALYGCSNRQRGVTACRNIPAKFFDHHFIAELCLNIPAFLAKIQAASTITSDSLRSYLGDVERRLLNLSESIERNGDPVGMLTSRMRQLADEKIEVLAKIEQASFSSNANPESFDAYQAATVYIPAFLNRYDDDPEGAEQAFTTRALFRARLLSAVSNVTVNQDRRIATVMLRSGEKLPLTLPSIDEIAGAAEYGVSAEEDLYPEEIAEDRRLADELARRFLN

SEQ ID NO: 1043 - protein, 561 aa, synthetic construct
MNEVKRRNVDEISKLPVVAYCRVSTNKQDQESSYENQHRFFRERATKTENEVLVKIYADKGISATSLKKREEFKQMLYDAGINEYRGRDEFTYEIDHKRKPKFKKIYVRNTSRFTRDASIISILRALLKNGVYVHFLDIDLIYDDASKEFMLNMFINFAQQESIDRSKKVKDGNEVMASVGSIRVGGYGIYGYEYSSFTKKLTIIKEEADVVCKIYELYLKGYGVRRILNYLQDNGIKPRSGKERFSISSVRRILTNEKYYGCNVRNKYDSGGVFTKHYPKLKNKEEWIYHEGVIPAIIRKDTFLKAQEIGNNKIHRISQKGVYKGTSEFAGGITCSRCGATYTRNVDKGRVFYNCSTKKSRGVHACDNINISEDKISESINKLLEIGVKKKFDKYKETMTQLLKDMVRSKILAQIDKDNEAEVRVIQEQVDKLTRQKNRLVELYLDENMDKVFFDEKATSINNELDIMNKKISELSRSNQEIYDELHEFDCMIDEINQIQMSEVSNREELLQLIHIKIERHSENSKKPIAKIFFKYDEPIKKLSSKYKILEGISSVIIHT

SEQ ID NO: 1044 - protein, 578 aa, synthetic construct
MKVALYARYSSENQRDASIEDQLRLCRLHAEKQGWTIVDSYTDRAISGASLLRPGIQELIQDATRGRFTIVLAEAMDRLSRDQEDIAGLFKRMTFAGVRIITLSEGDVTHLHIGLKGTMNALFLKDLAEKVRRGLRGRVEDGKSGGGNSYGYDVVRQFDAQGERIRGDRTINEEEARTVRRIFTDYTRGKSSRTIAMELNRDGVPGPQGREWGPSTIHGNRERGTGILNNEMYVGRLLWNRLRYLKDPDTGKRVSRLNPESEWVIQEVPELRIIDQDLWDAVKARQAETTFNQPERGNEALSERRRPRHLFAGLIRCGCCGGGYSMISKDLLGCSTARNKGTCDNRLNIRRDALEASVLSGLRTHLMEPDLFKEFCNEFTREVNRLRMEHGADLVAMRAELPRIDRELAKLLTALKAGGPIQAIVDDMKRLEARKAEVTERLANTEEPPPLLHPNMAEIYQQRIASLYESLQAEETKTEAAERLRTLVSQITLQPTEGELAIILRGDLAAILQFAAHKKNTTAHPDSGVLDAFVSQVSLVAGNRTLRSRRNVANGHSQASLVAGARYSRYQHSLVVAI

SEQ ID NO: 1045 - protein, 590 aa, synthetic construct
MPQLQIMPKVYSYTRMSTPEQLKGDSRRRQVDAANAYAARRGWVLEDRFDDLGVSAFHGKNHQFGALSHFLGLVDSGAIERGSVLIVESIDRLSRQDIGRALPLLLDLIHRGITVVTLSPEQEYSSQTVGDATNLIGALFIMARAHEESKIKSHRGREAWISKRSEARDAGKIATRRVPGWLVVKDGSIEVDQHRAEVVREIFELARDGWGAYSISRYLNERGEVPWGNKPNAVWRESYIKKLLRSRTVLGEYQPHTVRIEDGRQIRTEDGHAIADYYPKVIDAALFREVAVTLDARRVTGRGRKGQRFGNLFTGLLRCRCGAGYRFVSKGPPPKGGDYLHCSVALAKGNCSMQPLRYGLVEEFLLGQIESLDARRVMSGVLVDQRLSDALDEKRALEEQIDTSRNAIAKLTDFIIQEGTTGGARAVKVRLDDEERILAKATKQLAAIDLRVAEIRMASEGERRSALAQLITQWRSDPTNAPILRRALAEQIRSLVDRMVVSPGTHVLEEVLDGGPNESEDGEAVASSDDWRTTFVVKSEAELRKLFKDRNFEVHIYYRSGAEERVDAMRGPVFRANASRKMKEMRLVNG

SEQ ID NO: 1046 - protein, 587 aa, synthetic construct
MRGAIYSRVSTEIQDYGKQTDELKDYAARNNIEVKYIFEEKVSGFKDDRTEFKKLEKLTKNDIDIILVWELSRLSRRSIFIQQTVKNFANKGICIFTKKEGLYTLNDDGTENKNAMFTIGVISMIAEQEIETLKERTISSKRRYILKEGHSYTPIAPYGYNYNLTTKQLTINEDEAEVVRRMYQLSIDGVSTNRISKILTSEGIKTKKGNPNWSLATVRDILHNPVYKGVPKYTMTIRNKKVVELVSAPPIVSEEVFEQSEKELTERRNRSKSEMVNKPLLRALIFCTDCGRRYICSSGKSIYACQTRFDNIRANYVADCHSAGISATNIEPIIWNLVERLFKSTIASSKAQERIEPYQEQLSKLSESKNNFEMQRDKINKDAAKLFDTLLLIRDTNPTVFTSKMEDFNKMSTEANDYQKEIDIIESKKQAIQRRIKAIEEIKDIDITDESEKYDILHKVIEAIKIYSVKTNQKVFTVLFASGLEYNVLYNVNKPKFRIEYAFVSDETITFNKKDKLLINKLYSSVRDILPDFSITAGNNDMFDNDVCGDYSFQEVWKLLEKYNKTEVLREWKPDYTKRAINRRNKK

SEQ ID NO: 1047 - protein, 479 aa, synthetic construct
MRYAVYVRVSTDKDEQVSSVENQVDICRYWIEKNGYEWDQNAVYFDDGISGTAWLERHAMQLILQKVRKNELDTVVFKSIHRLARDLKDALEIKEILLGHGVRLVTIEEGYDSYYEGNNDMKFEIYAMFAAQLPKTLSTSISAALSAKVRRGEHTGTIPFGYDRIDKKLIINEEEALLVKEMFDWYEDGRGYRMIANNLNKKGCRTRFGNLWSEASVKTIVTNSLYTGEHVMHKYKTVKVDGKKKTVKNPKEKWLVFENHHDAIISKEQWERINPVSGVKDKKTKSDYRNEFRGIVWCAHCGKRVRAIYAGVRSKYERVYMKCSTYKAYGTCINHIPVRYEDFRNLILERLKQKQEYIETRLVAQIKDKLQEKIAKSKKTIKQLGSKKEKLLELYMDSFIDKETFVNRNRKLEDEMTAQELQLLKLKDKDIQNRETKDIQDAFMLLQEEQDLHKAFQKLIKKIVFYQDGKLDIEYTFDY

SEQ ID NO: 1048 - protein, 465 aa, synthetic construct
MKLRAAIYVRVSTMEQAEEGYSISAQTEKLKSYANAKDYQVVKVFTDPGYSGAKLERPGLQNMIKSIESKEIDVVLVYKLDRLSRSQKNTLFLIEDVFLKNHVQFTSMQESFDTSTSFGRAMIGILSVFAQLERDAITERMQMGAKERAKAGMWRGGPQSRLPFGYRYIDGVLLVDDYEAMIVKYMYTEFIKGTPLTKIQSKVAAKFPVKETLIYPSIMKNILQNNIYIGKIKYAGETYEGLHEHILDTETYDKAQQLWEHRNTNKKKYFESKYLLSGILYCGHCGGKMASTGAGLLKSGERVTDYICYSKKGTPSHMVVDRNCPSKRHRVNRLDPKIVELLKTITFEEMQKDNSFTDNTTTIKSEIESLDTKISKLLDLYQDGLVPIDVLNDRISKLNDDKELLQETLISQKKQIHPEEIAKNIQTAKDFDWANSDSAAKRAMVRALINKVELTNEDMKIEWNI

SEQ ID NO: 1049 - protein, 587 aa, synthetic construct
MIDRDSWLYVENLDRITRQSPTKAQTLFIKLLDLGLTVVTGMDRRIYTLQSVNDNPTELMVSLLLFSRSHEESKTKGNRTKGNVLALVKRFREEGLPVNIKSVGKHPWWIDDSGTQYEAVRKHEQYWPIAREIIDLFLSGQGAYKVKRHLDNTYPNGFIGGAEWDYQMLVRMRKSRALIGERTITLNKKNKSTKDKDIWKEITTDKEVTYILKNYYPSLCIDEVEFIKLQEVKNQNEYQSKDSTGTVNIKLLSGLGILRCGKCGGTMNSFMNKGKPRYICTNGRHLGKNCTGWSVNGLLIDHCSIIALIIGYMDTNNKGGVDTSQIEKMIEVGNEKLATLDNSINNISEAIEKGFNIDQMVTKGIALQQERERVISELDRLVKKKIALDGKGTFEMAMLDFLTLVQWEVIENTDHEVRNKIRGVINSIIETVIVNKIDGCISISIKLIGTDVFFVFSGDGRKPKWKFDISYGSGQGIEDESISTVMDAIKGSELMEKATEHLNNIRQSYLDLLDNVTNQMLPVLGYPDIDGKQFWPNTSGNERIAVNYNGQRYTLVAKGTLPADVALLIKESGLKRKDFIEKFRITN

SEQ ID NO: 1050 - protein, 502 aa, synthetic construct
MRKVAFLSRVSTLDQHSSIDNQEEVFKNWLKRNSGCILYKIYTDEGISGAKGYKRKQWLNMLEDGKKKKFDILISKSYSRFGRNQRETLDAIAMLRNNGIRIIFLEDNLDSEQDSNKFGLFAWLAEQEAQKTSERIKIVWENYNSEGKVHVTLAPYGYDYNKEIKNFVVNDIEADIVRKIFSLYIKGNGYNKIAKLLTENNIPTKRNGKWAGTTVGNMLKNDFYLGVLTQGKTKTIDVTMDTKKKIPKEEWIKHINNHEAIISKECFESVQYNIKKRSKRIKEFYNETSIKQSNSSLFSNLLICGECNSRLSIKRKKKLNNYKPFYNCINYELRGIKVCGHRSNFIWEDILINYIKEKLDSIVKNNYKELKNKIKQKNTCNIKYEKELKCIENKIKDQINISTRLLCEYTKGNVGEMNYKLQNEKIEKILKHLVNRKEELNSFANSGRKIKQEEKLLIGGINDLLETKTEDWNNAMIKSIIDNIVVYIDGTIEIYFKYLNDK

SEQ ID NO: 1051 - protein, 510 aa, synthetic construct
MGTKEQQKRAAIYTRISRDKEGTELGVQRQLDDCLALAERLGVEVSNIYSDNDIGASSRSRPKPRPQYDEMLRAARAGEFEVIIAYTTSRLTRRMAQAVELVALARDTGIEFQYVKSPSFDLNSATGRQVAQILATNDEMESDVISERVSRAALQRAEAGKFHGNLGPFGFQTVKDPKTGKVAGLEPHPVHADWVREAIQRLLKGDTVYGICVDWNAQGRKTRERKNNPGGSHWIPKTLRAVVRNPALVGKRSHNGTLYDASWKPIVDQRDWDRVVTLLNDPSRRERGRNFGTARKYPLSGILSCAICGTTLTSMTATRLRGYSFVCSKIPYDGCGKVRIAHHPLEDWIREQVFARLDTPTLDPPADEGLRARETALHDELAKLGEQSKRAKEGYVEGILTSAESKAQLARIADESASVETELAELTATSVRENMPRGERLRSMWEKKDATWQRQILGSVIETVKVAPYPKGVTTTLTRFKAESDEEYQARKLGWQLEVLEQRVKVKWRA

SEQ ID NO: 1052 - protein, 506 aa, synthetic construct
MTLAYSYVRFSSKTQATGASLQRQLEASELFCLKHGLTLSDVSFRDLGVSAFKEKIRASLEDMLTAIENGTIPKGSYILIEALDRLSRKGISHTQDILKSILRQGVSVAFVGEDARTLSGMVLTEASLDDLTSVIMVSLAADLAHKESLRKAKLVQDAKARTREKAKQGIPIARRLPFWLQYQDGTYIFNDKVSVIREIVSLRQQGQGPRRIATYLNLSEIDAPAGRGWSHTTVSHILTAPYLCGDYQTYRTIDDKLVPDTLVKDYFPAVVCRDEWLLLKADQKYSSKGKVAKDNPFAGVLKCKCGGGLVYSLKKMRGKSKESYYEYHHCSNSKLGLCDQKGYIRDLIPLLKRVMNKLEIKTIKNDRSSIIQASMDEANDKIRHLNRLLLELASPPLSVLQSILELEAKVETAKSELHQVMHANIGLSSSDVDRLASISDAAEYNMHIKRLVERIAVSHSSKQNYSVRIKKRDGHTQSFIVLNGEIKLMSDSEKLKNWLQEHGQSN

SEQ ID NO: 1053 - protein, 487 aa, synthetic construct
MTLRAAIYARISLDRKDEAGVKRQAHLATKLAEAEEATIVAEYVDNNASAFSGMYRPEYENLLKSIEAGELDVVYVYALDRLTRRTKDTLALFELCEKHNVRIKATQGYSIDPSDPSSRIIIVILGLIAEQESIDRAARIRASYVDRARVGRPKTGGRRMLGYEADAETIIENEAQAIRDAAVMILAGKTLRETVREIFHARGITATSGRDMTAPTLRDILLNPRVRGISTFNPTDPVTGYRLIRDRQIIGPGQWPAIIDEATGEKLDAVLRDPSRRRSHAGNAPTRYLASVLTCTCGDPMYSRTRAREDGSRRRYYACGRGIPGGTHVTIGDEVDSLIERVIIGRMAKPDGLELLQQSLSTNKDSTETEELQELVSQRNALLARLEMLEDSLIDGEIGVDAFTRLEKKIAEQLTGIDDRLQILTTARTADPLAVELVGVTDFALWWENASVEDKRRLTRILMDIHILPGTHGAKKFDPTRVQVTWH

SEQ ID NO: 1054 - protein, 578 aa, synthetic construct
MKGAIYSRVSTEQQDYSKQTNELKDYAKRNGIEVVYVFEEKESGFNNNRPEFEKLRKLTKQDIDIILVWEISRISRRAIYLQQQVQEFTDKGICIYAKKDGFSTLNDDGSVNASTKMLIGFASIIAEQEAATLKERTISSKRNKILREGKSYTYYAPYGYDYSKETKMLSINEKQAQVVKRIFQLSIDGYSTERIAILLNAEKIPTKGKKENWTAGTVCNMLTNPVYKGEANYTLKKEKKAGSTYCKPMEVVTISTPAIIEKEQFELSLQKLAERTKRSNSFGTKYNPLLRGLIHCPHCDVKYVYNFGTNQYLCVNKYKKASNKNVHCTAKCISNKLDSIVWNVVKTFFYKELAAGKAQEQIEPLQAEIESYKRQILLLDGKQSELTARANIIVDAAIEIKIQFPNMPDLYANKMKEVEEINKEASKYQKEKERLEKLIHSNESRIKNINRASKESALVESITDETEKYDLVHKAIDKIMIFGEGKISIIIVTFSTGQTIYLGYSSKSNSKYYTIFYPSSDIYFDIQTSKGYINHLKEKATINSDGSIYLGDLTGEVKEYSIIDFVNYLDIEENRRYY

SEQ ID NO: 1055 - protein, 565 aa, synthetic construct
MIDSSVGGTMTNKYYLYHRVSKKEQASSGEGIFRQQELTNNWIENENKRLILDGKEPYAEGGVYEDSGRSGFTDDNFKKGELGRLFKDVSRGRIRSGDIIVIELIDRFSRGKRKNVVKRFQNLLEHGIKVAFTKWNLVFEEDMDGVQGASAWMMFEIGLYLAHLESVQKSDRIRATNKLMKDKGYVTTAKTPIWLNRTLDRKGYEVVQENAEVIQRIYQLRMEGLGPQKILNSIGGVELKRYTYNTEEKLVVSSTNSPLCESTIKSYLANKAVIGVANGELKFEPIIDEKIFNAVQQKVVRNIGGGGKRKVFKNILSGIGFCKRCGYSMSYQDSTSTYGKVRSYLYCNGKRKRKQCDAKNIKYPLLESKVYEILSKLDYKDEESVDILSLEQQLKEIKDEVSSIRQNMIKFPNDQEFEKLYTERFSNQEDLELKLVEAKTSRSGDLSFLNVDYSRPEGKQQLNEIFKDYGIKVLVEDDTIEITVGAWNDFMIKGSLSSTVNPIAALNGKKYGSKGIDYDANTSIERYMLEAPKEDVGSCVSSELGKQVLNLYPEIKDHILKGNKQ

SEQ ID NO: 1056 - protein, 524 aa, synthetic construct
MKLSHILQPKMKAAFYGRHSTDKQDMDMQLNSVMEVIRKYECIHTHSHSFLDKAVSARKNKITSRKELENMFEAAKRKEFDFVIVYKSDRLARDPLEHQTIRIVMKTLDIPMIISSTESVYNTDNDLIVQLMEDGFTKYEVDTIIARTQSGLENKAKQGKWLGGKPPFGYTYDKNSGQFIEHPEELCYVKEIFNLYLNGHGFQHIANTFPNGSRRGKDWGKENVKAIVLNPFYCGLLSWRRQTDGKLNARDIWIEAPNHYVKPIISRNIWEACWRIYSEKRSGSIVPKHYKTSFLLQGLLSCEKCQELMKTKNQQTVSSTNKQYGRKIYFCTNCKLRIDTDLLHDKVVNQTLTDVKISGFHNVYQAIEQKIQYEIQELNNNIQKHQHLFENYTIKFHNITEELKQRMNNNDDKRFLKSLAIYRLDVQRKLDGVTQQINDFKQQIILKEKVEKSKETWLNTLNKVFEDDAKIQEISDMDKRRFLLPLIQSVSIKENKKRKEYDISLQLRTDFSKRDVKNQISLIL

SEQ ID NO: 1057 - protein, 466 aa, synthetic construct
MAAVFSDNNISASTNSTKGRPQYDAMLARARGGEFTHVLAYSDSRFSRRLREMLDLIDLARDGVIDIKTVVSGYFDLSSAQGRGIAINVATQSQVEAEIIAERVTRAARQRVESGRWHGGVPPFGFSKEAKTLIIDDREAALIGEAASRVLDQDETLYSIVKDWNNRGDLTRKGASWKHSVLRNVLTNTALVGTNSAGVENCWQPILDRQTFDRLCERLAPDSARRTNPLGVKSSKHALGGGLIVCGRCQKPLYPVARQGAPTKLVCRAFANGDHENHPKREDGTSEGRVSIDAAALEGYLFDRCLAHLEDDQFWDDIKRQRETADSDTAKLRAERDARQGERDRAGRAFVAGIMSERDAQIEVARLDSEIARLTQLVDHSHGGPTARDVWNERSEVLDRFQDWTPGERRLFFRALAARVSVGDWPSGLPTTTLPRQGESAVAFEERRAALARSAMASRVQIDWQG

SEQ ID NO: 1058 - protein, 582 aa, synthetic construct
MTNKPTAYAYIRYSSRKQGLGDKDSVDRQMNSIKAIAEQRGIEVRPENVFSDTGVSGYTGKNQEKGKLKDLIDLILNQQVKQGDYVFVESIDRLSRQRMRLSKDLVYKILDRGVTLVTTIDGQVYSRDNDDLRQDIMLTVIAERAHEESKTKSVRRISAWKRAKEQAESTGKIFNAHRPPYGIRFNKESEKFEIEPVEAQEILDIFESLKLVGINQTIKKLNSSSKRRWTQFHIRNLIDTKYPLGFFCSQRKVDGKLIFEKYIENYYPQIVPYDLWQEAITTMQSRKINKQSGRVSPDNYNVFRHIAKCGVCGENMYFHQNFNVRTNSYYYLNCRSNLETDGSCRHRFRYDFAFGILLQTVYQATTDEDYNVHPWQLLANEDWEEGTTIKVLSENSKITQMSEEDESEIIAAESFRELLAQLLARKETVSAKHKELVMAENEYLGHKIKLENFEKSLESGDGVISATFLKTLANQELKVAEAEKMVNQLKTEIAKSRSDITFYNYKDVIELNKTQEGRLRINQFFLQNNIHFKFRFDKTTRTLYAWIIQSNKEVERQARGFPINNPLSEFGLKNLTEYRDEG

SEQ ID NO: 1059 - protein, 427 aa, synthetic construct
MKKLYLYIRLSDADDDLKFKTESESIANQRTLLYRFIRARREFDGYEVVEFIDDGYSGTNGNRPSFERMIESLKNGEANVVICKDFSRFFRDYVEIGDYLERIFPFLGVRFIAVNDGYDSDDYKGSTAGMEVVMKYIVYSYYSRDLSQKIKTVMSTRKSKGEFVAAQAPYGYMKDPNVKRKIIPNPDTAPVVRKIFDLALEGKTPAEIAVVLNDYKLETPSAYFMRMNPDSKKFRTASQEACWTVSNVREILKRREYTGVMVMNQRRWKGLDNPRTVWTDESEWQIIPDCHEAIVSESEYEEAQKVFRKIRKGYDRSPDQYLLRSLVHCGACGRTMQRQKHSPVIYYTCLKSVSNRETACPVGERFIEADLERIVKNDLLEKLRLLVDADDRLYAAAAASEGTEENLRFRLEQIDIPHGTRQTERRE

SEQ ID NO: 1060 - protein, 550 aa, synthetic construct
MGIKTAFCYCRVSSGRQKTEKGGFGMSRQQALLTTYVEEYEDKDGLGYELNVDNIVFLKAEGVSGFSGKNIEKGSVLHSFIADYKSGKIKNAVLIIENIDRFSRANPNEAAELFLGLINKGCDVHEIDTETVHHRCSDLNQISAGLTRSHKESLRKQKLSIKNWDERFEKTVKKHVPLTGRCPGWLKVENDLYQEIPERVAPIRLIFEWYNNGYGQAYIRDRLNSEGYKYNGKTWSNWSVHRVLKDERVTGKHRTQSTLRNNFDGIMMYPAIITELQFKRAEQRLTKPGRDKKINRRANTLFSGVLICGLCKAGHILINNENGNRFGRCSHAIAGNKRCVANGFKYNVVENTLIKYLRHLDFGSLNNSSHAVELENLSSELIHYSNYLANVQRTVDSVDIPSETDYKVLKNLEAKVRELQGKIDDIKALENVSVSYEEIVKKINNELMDVSNIEVRQEFNIKIRKIIREIQILKIQKNIVLVSVSFYVSNDVQWITISLKEGLLLSNTYVENKVLVVTLGNEIMTYDIESKQYYLNSKPISNEDAYALFD

SEQ ID NO: 1061 - protein, 376 aa, synthetic construct
MTKKGFTQNDNNLAIAYYRFSSHSQNEASIDQQREQAQAFAKAHGYNIVKEYEDAAMSGTTSDRPQYQLMLSEVGTIRPAAVILWKTDRLGRDRFELADAKRWIRDAGCRICLIAEPTPDDSPESVLMETMMEGMAEFYSRQLSVNIRRGMTYNAGHALYNGHKVWGYGVDDEKHHVVDDSVAPFVLDMFTRYADGEAMQSICDDFNAKGLRTTREALFSVKTMNKLLKNRAYIGEYRHGGITVEGGMPQIVDEDTFDRAQRRLAENKRTGARRKASAQEQDAPRYWLTGKLYCGECGGSMQGVSGTSKTGAKHYYCYCKEQRAKRCTKKPVRKEWLEDAVTGVLKGLLDDSENLASIAVDAAKYYEGHYRVPREP

SEQ ID NO: 1062 - protein, 565 aa, synthetic construct
MKPHAYIYARFSTKRQDRGESLSRQYELTQKMCEDNGWEVVETLTDKGQSAWRGNHLRVGELGRFKERIDHGDIPPGSYLVVENLDRLSRQDIKKARRWIEEVTDAGIRVAVASPAPGKIFDEVSLSGENIVDLLQYLLEAQRSNKEAERKSQFQQKAVEGFMNKARNGIVYSKRVPAWLKGEKNGSFEVDEIRAAVVRQIYEWCAAGQGIHLITKKLNASVEPWTVGHKSAPSWKVGYVRDILTGWQAEGEYHVRSGPNRVRTGEVITNYYPRVVPPELVAAARSAMDSRRGATGPNHSEAKNVFAGRVKCGHCGDTMIRTVQRNTRGTQYEYLKCTRFNNGAECVNTTLYRYDNFERAALDQILHLALDHSHFVRSDETGPLLAHVAQLSKDVELLETERSNLMAFIRKHGEDDDTERDIVLLRPKLAAARADLEKARDALERAKGHATPEEHLARVLEVKDAIASEDDEVRQEARRIVRDAVRSVVQVVTCRREYMEGRKTPNRQIQMTLAGGLLAFLFDNDGTLLQKVDKSSLPDEMLTGLKGTGAEQAIKDVKRRRSKAL

SEQ ID NO: 1063 - protein, 525 aa, synthetic construct
MYLEISNPMDYHVALYIRLSKEDETEGPSQSVTNQKSLLNEFVQQHRLSVYDTYIDDGWSGTSFDRPDFQRMIGDIEAKKVNMVITKDLSRLGRDYIMTGHYMERYFPEKRVRYISLLDGIDTGVESTANDITPFRAIMNDMYAKDISKKIKSVKRDKQRKGQFIGGKPMYGYKMHPTEKNKIVIDEKVAPVVRRIFAMALDGMSCRKIAATLNEEGVPTPATYCGWNMGRKGPYAGLWSSERISEMLQNETYLGNMVQGRTVKISYKSKKCLKQDRENWVVVENTHEPLIDKETFQKVRMLVNSRKHTRSRTYDFLLKGLIFCHECGYPMAVLNRPPVSGEDRLFFVCRTYQRFTKAGVCSCHSIKEQVVTEAVLAKVREVCEAYLDPKKLQPIAADAVEKARQTESHEAEIQSLHGKIDSLTANLDKMYMDRLTGLLAEADFERIYQRVKIERNSLEDKLKELEAQKESPISTEDRARELVQQFLDSAYTSRELLVSLIERVELTEDKQIIIKFRFRELEAIS

SEQ ID NO: 1064 - protein, 500 aa, synthetic construct
MGLEVVGVKIDNDIGASTRTAKSKIRHAYADMIARARAGEFQHIIAYSNSRITRRVLELEDLIRLHEDTEEIFGKGKGVIIQTVVSGNDDLSTADGRMVARIKASVDTAESERIAERIKRTNLQKAMEGQPGIQHRRHFGFEADARTHRPDEVALIREAVNDLLTGASITTIRKRWQSEGVLTTDGKPDWGWTPVHRVLLGWKTAGVRSLNGKPLYDGDGNIIMGDWEPIISMEDREAALAKLEQRSRRGVKEGRWLLSGLMKCGICEGKLYGQRDEPPTRSTYGCNSGKTNNHLSINALRVEELVSREVFEYVFARTYRGLDVAPEVESVWPKEAELASISQRIDELMAAHAKNQLPGDVVFPQVTKLSDQRAELRKERSVFHSEKTAVPATRGEEGWMRTQALNTEDSSFEDRQAAIRAEVEAVWVQKASRGRFTGGRFEEAFRERVNIVWREPHPEVEPLTDDEWRSIMARVDDSPESLRRLWEMFSVPEGEDTSAS

SEQ ID NO: 1065 - protein, 488 aa, synthetic construct
MSKKVAIYCRVSTTNQAEDGYSIGEQEDKLKKYCEIMGWQVSEIYTDAGFSGSNIERPAIQNMIYDAKSHNFDTVLVYKLDRLSRSTRDNLFLIQDVFKNNNVEFISLNENIDTSSAMGGFFLTILAAFAELERETIKERMQLGKLGRIKSGKSSAVNNAALGYKYDKSTDSRVIVPTEAKLVQEIFERYASGDSISRIVRDFLARGITGKNGGHITPTRIRNILSNEVYIGKQRYQDKIYDATHEPIITEEMFYSVQKELEIKQNDAYKKGNSRPFQAKYMLSGLLKCGYCGSRFDTYVGKPNKAGEKTVRYVCRNRKTARAKFSRKDIYDGLGYSSCPYDGFYYKQDLEDIVINEILELQYDKDKIKNLISEKKVKAVDEKQVKSDIQAIQKKISRLNDLYLVDAIDLDELKVKVKDLKQKEKNLEQLLTSNSNKQQELKMKEAKEKILLSTDISSSDYEVQKSIVRTLISSINVKENELDIVWNL

SEQ ID NO: 1066 - protein, 533 aa, synthetic construct
MSAKKYLIQYHRVSDPSQLKASGMQQQKAPDELIQNLCTEYDLEVYPKVFDDRGHSAFKDAGERKGYGELLKLLEDDIHPDSVLVVLNQDRLSRQGVFDAQSELMGILRKCRIYVMHDNRLLDRNSDNIMGDLILSLANAQRAFSESDAKSKRVKAAIRIAIQKHNAGHRGKNGKPLVLPIGSLPWWFKKVGNEVYLDEPIVVAVKDAITKLIDGEAPLRVKQYLDQTYTPPARLGRGKVDGWSIDAIKKLHTYEQLIGKLVLNLQDGNQEVKDYLEPIISEKTYYQLVNARTQKRARRETKSHSVHIFTGYGKAHCRGCGGTMSSTINNGVLKIRCSNGLNKRIKCDAPVNLVGNGFKDFMVNEVLKNLGSKSVEGTDSNVPVIEAKITSARNQLNELVELFDELPSRALAEKLQGKELELDQLLEELHQEKVVAVAPHWEPITEVPTGDVELRKAFETLLNGMKFYRHSDGSVVITVTTTVDVNFSFALRRGKLVKQGYITGTSDGELSLRDDQEFHRYVLDGSFDRWLSE

SEQ ID NO: 1067 - protein, 492 aa, synthetic construct
MPALRAAIYGRQSLDRTGEGAAVDRQIEDCRRLIDQRGWTLVREPLTDNDVSASSGKRRPGFEELLTMVDAGRIDVIVVWAVDRLVRRVIDLEDVIIRCERTGVRIATVQGDLDLMTPQGQLNARIMASTARFEVQQKAARQKRANEQRAANGHMGWTRRPFGYDRDEAGRIVVMEDEAKGLREAAEMVLNGSTLAAAVRMLDERGLLTTGRRVLRSPTGEPLRDADGATQHGPFLPWNVTSLRRALLSPRYSGRVTYNGADVAEGSWPVLLDAETQTRLAEVLRDVGRRVQQGTEAKYLLSGVARCGNETCQKAEANGEPPRLLFSSPMGAKGKRWIVYKCRACYLARRADLVDAVVEAVLLARLSQPDAASVLAPSADLDGLRAKVVELRGRRDDLAALLAEGVLSAAAVGEQAKKLTARINDLEDRISDALGDSPAVALVNSEDVETAWDDLDVRSRKAAVDALMTVTVLPAGKGRRFTPEQVRIDWRQ

SEQ ID NO: 1068 - protein, 579 aa, synthetic construct
MSIALAYLRFSSLQMQGKGSSISRQKDMVTKWTEEQKLLMGKNYDEVSYYIDRGKSAYDGTNLREGNLGKLIEEVQRGMFPEGTPIVCESLDRLTRQGVQHIQQILTQLTRTGCVVHTLSDRQVISKDTLESLGGIVTIVAVADRAREESETKAKRVRDSKLRNYKAAREGKKLMTKHLPGWIYLNESTGKLCVDPEKQKVVTRIYKLRLEGHTFQSIANIMNDSGVPVLNASKGARHWLPNSIRTLLMNKSVIGYSSPSKVNPLIEEIPGYFPPCISETLFNDVQDTHVPAKRGKKTRPEYAEAVNLFKGLTVCKYCKGNVFPNGAKPGYWGRLRCMGHHNKTCEAPPIGRYAFEHSLVTRMFPLLRFFDTTKQEDPSAAIRSKIGHLQTGIDNLYNMVRDMGYTPEIGKRIKASENEKEGLERQLIAIKKNIESSTEENMSQLNFDNYNDRLTMQRILSRTIERVVVDSFNERAHVKLLNGNVLYGFPLYGDSDASLTLQKALSGTDDELFAELGMEKPLHTIYMVTSAKSQQPYDYNAVYYNKDLKQPYTVNQGESPHHPDDSKYWPDVEPDYPNE

SEQ ID NO: 1069 - protein, 503 aa, synthetic construct
MLRIAIYSRKSVYREQSISIESQIELCKKYFEGKECSFEIFEDEGFSGGNTSRPSFQRMMNKIKSKLFDVVAVYKIDRMSRNLLDFWDTYSLISRHGVQFISISENINTTTTIGQMIMLQYAGMAALERDNIKQRVKDSMESLGRMGRWSGGTPPTGYRVIEVEQHGKKAKYLELDEAIAPMIERMFKLYSTGSTIYEIQKALNVPNKTILNILRNPVYCESDYVSAKYLELQGYSVYGEINGNGYLPYNRRQRKDGKKETKSKDQLVSVSKHKAIIDSKLWVNVQEKLNEKASDPKPRISDKTFLAHLVKCKCGSGMFVYPGKTKKDGSTVIYFRCSGKKNGSECNSKFLRADFVEKKVLESLSNIELDKSLFNTSDMNKYDSQIKNLNKNLAKNKKMIDNLLNRLALASDDIAKSILDKVEDINSENKNLEFKLLELERLNLESMNTKNNKEAFYAQVKSILDTFDTLPVSEQQKMISTIIKNVVWDSDTKKIRLEIFEGI

SEQ ID NO: 1070 - protein, 515 aa, synthetic construct
MAYNVIAIYLRLSCEDTDINSKDESNSITNQRNLIMEYIKSDAILSTYTVREYIDDGISGTRFDREAFEEMMTQVKEGNIQVIITKDYSRLGRDYLEVGRYLEFVFPVLKVRYISVNDNYDSNNFTGATGGMEVAVKNVINMMYSRDASKKVRSARTTLAKAGKFIGPQAPYGYKRSESDKQKLVIDEEPAQVVRLIFEMAIEGKKYKQIARYLNVNNIDTRVQYKERHGKKWNHPRNYEIKQWSASAVMNILFNEIYTGTIIYGKTACNAQTGYKSKKMNPDSWIIVENCHEPIVSKQTFEEAHKVINKTTCNRTQKQGSYKKAIIICGCCGKGLANSYGYYKCSCNYDPSKYNCRNVRMKTEEFEAGVMQYIKTTAAGMLEHLQAYKRQRSSCVELQKEIDKLQQMKSKAETQKFQLYDDYTKGIVQRDIMISERTMLTEHIGEIEIELHKLESKIQLEQCINKAGEEETIELLSKMETFDLDLIRQVVKRITMYDDGNIQFEWNVDDFIQVK

SEQ ID NO: 1071 - protein, 534 aa, synthetic construct; identical to SEQ ID NO: 60

SEQ ID NO: 1072 - protein, 458 aa, synthetic construct
MNEQKDKLKKYCEIKDWTIVKEYVDPGRSGSNINRPSMQQLIKDADTGLYDAVLVYKLDRLSRSQKDTLYLIEDVFQKNNIHFISLSENFDTSTAFGKAMIGILSVFAQLEREQIKERMSMGRVGRAKSGKIMEFNNPAFGYEIDGDNYKVDPLRAEIVKRIYKMYLSGTSINKIKETLNSEGHIGNKKNWSDTRIRYILSNPTYLGKIRYDGKTYDGKFSPIIDEETFNKTQNELKERQTATYKRFNMKLRPFQSKYMLSGLLRCGYCGATLFVNSYVYNGKRKLRYNCPSTYKSKQKTRTYKIMDPNCPFKLVYAKDLEPAVINEINNLALNPQSIQKPIKKKPDIDVEAIQKELAKIRKQQQRLIDLYVISDDVNIDNISKKSADLKLQEETLKKQLAPLEEPDNDDKIVAFNEILAQIKDIDSLDYDKQKFIVKKLIKKIDVWNDNKIKIHWNI

SEQ ID NO: 1073 - protein, 433 aa, synthetic construct
MSTMTKRAALYLRQSKSDDEGIERQTERTAALATARGWQVADTFIDNDVSASKARGKDTAWGRMLAASDELDVVIGVDLDRVVRSTRDLNTLIDHGLALVTLDGEIDLTTADGEFRASMLASIARFEVRRKGERQTRANSQRAAKGGVPKGVRLTGYTTEGLVVHDEAAVVRALFEGFATGLTLRTLSRDHGLTPSTVRTILTNPRYAGRRVYKGEIVGTGDWEPLVPGELFDSVNRGLADPARKTNRTGSTARKHLGTSLFRCGECSDHPTVRTAGSGGRYWCPACSLVRTMSPIDHFVLRVAEARLADPAFLATLSPDVDTDPLRAEHASLTERKADLAGLVADGTMSRADVKGAVERLNARMDEIDRALAGADRPVDMAAAYASMLDGFDTLGLDRQRALIDTLMTAHLLRAPRGRRGFDPDTVRIVWRN

SEQ ID NO: 1074 - protein, 703 aa, synthetic construct
MIDASEVREDDETYMNPIDRLFEALEKKEPTHFAVKQYKKYKLAAGVVCSKRLLNQAVGKSLRTHNLKPKKGAQVMRKNEKITALYERLSRDDFGKDDDQQRESNSISNQKAMLEEFAARQGFTNIVHFTDDGISGTCFDRPGFLAMMKEVEAGNVEYLCIKDMSRMGRDYLKVGQIMEILRQRGVRLIAINDGVDSARGDDDFTPFRNIMNEYYARDTSRKIRSTFQSKGKSGKHLTGTVIYGYLWNEARDQWLVDPEAAEVVKRIFAMTIEGYGPYQIASKLKEEKILIPSAYLAQHGEGVNKNKTFKDVYGWGSSTICNLLEKREYLGHTINFKTRKHFKDKKSHYVPENEWTIFENTHEAIIDQQTFDLVQKIRGNVRRYPDGWGEAAPLTGLLYCADCGGKMYVHRTNNGKRISQYTCSQYSKVPVGKLCTTQHRINEDVVLSLVSEMLKAIAEYAKHDRAEFVRVVQEAQSSQQTAEVRKQRTRLATAKQRVSELEVLLCKIYEDNILGKLSDSRYATLDAQYEKEQSELTAEISVLEKAVKSYEKHEKDADRFIALIGKYENFDKLTIAMLNEFIEKILVHERDRKGSIQTTQEVEIYFNFVGRFVPPAFGEVELTPEELEEIRKREERKDRLHQNYLKRKASGAQKRYEDKIKERKKAEIEAKKAAIRAEDIAKGVFVPVSSLPQREPMKGVQSA

SEQ ID NO: 1075 - protein, 532 aa, synthetic construct
MQELHNNYFNIASEKIWKVAIYARLSREDEKDENYKGQSESIENQIKYLKSIVTTKGWTLIDIYKDDGYTGTNFDRPDFKRMLDDIDNGKINLVITKDLSRLGRDYIETGRYIEKVFPSKNIRYIAVNDNVDTFDKRNSNNDMTPFKAVINDMYAKDTSNKVRSTILTKAIAGECIKAFLPYGYKKDKINKNKILVDENVVENVKLIFNLYKSGKSKTEIAKELNKLEIPTPLKYKQETTNYYNPNSNATYKWNSTVINKILRNPIYVGDLVQLQYNKVNYKIKKIKKVPEEEQIVILNNHEAIIDRNTFNTVQEMLDKKTNEWNYSDRKNHLLTGLVFCKCGSRITYNKNHGKVFRCVCSSYKKYGNKFCSNIHLKEAELLQMVASSLKKNVNTYLNLKDLKYPSIVEKDNRTQELAKLYKEKEKINKTITNLYEDKISSNISLETFKILIKKYEKQKKEIDMKISTISKSNKNTQELKLNQSQLENVMKQLLKFDTINEENKSLVLKLIDKIIIDDDKINIKYKFNNLEL

SEQ ID NO: 1076 - protein, 488 aa, synthetic construct
MAPQDAPTYAIVYVRISRDKEGAGLGIDRQREDCEALAERLGFRVIAVYDDNDISAYSGKARPGYRQLLADLEAGRATAVLAWHTDRLHRSPVELEEYITVCEPRGIVTHTVKAGPIDLATPSGRMIARQLGAVARFESEHKSDRARRKRDQMAQAGQWKGGRRPFGYEDNGVTVRPDEAAEVKQASESLLSGMSMHAIVRDWNARGVKTTTGATWSTRSVRNVLTRPRNAGIMEHRGEELGPAEWPAIVDEMTWRSLCALLADPNRRTSPGSERRWLLSGIAECGICEVGGVLTYLRAGTAGKNTGEDRKTAPAYRCRLDDAAKHVVRNAIHLDKYVSAVAVERLSQPGAAAELTIRNDGGAARERAIEREALRIHEQEAGEMFAAREMTRAQLATTNREIAARRAELDLADAAAARVTALAPFASGADASQVWEDLTLDQRRAVISQVMRVVVLPAGKGRPKGWTPEYGKEWGYFDPEAVRIGWKG

SEQ ID NO: 1077 - protein, 594 aa, synthetic construct
MEVIDAYIYSRVSKESQAKDGEGLKRQIERAEKFIENENKINTNYRYQLVDEIVDAGLSAYYGKNTSKNGGLGAFLEAAKQGEIKEKSLLIVEAVDRLSRLPADRSRRLFAKLKKYKIDVAITKFSLIIPHDEQLDMGVDLLLTAAFHLAHMESEQKSQRIKATFDKKRREETVGGEKRTSVCPAWMELSSCKTYFELIPERVEVLRTMINMKLDGYGCHRITKYLNERNIANFTGKPWRNEVVNKYLKMIQLKGELQRVEHQIIDGKTKKVPVGAPIENYYPPVIDRSTFIALQSTFPVSVKGRVGSAFPNLFRGLLRCPSCGNILSYSKTLRGYPKLRCRSRLDNQGCTQKYTRYDPIEQHLVQSLVGLDYSRLLNTSYKKLQKEISIIDGKMESLRNSILVLSDELSELEHIETIKVYGSLIDQKHNELDILSVKRDELTKVSSSYDYNAIKELDLTTVEGRQKYHEYVAKFIDYIVVQDPDSRSSATVVKFKSQKIGLLFFPFDKSSWDLSHEKILIDYYTKGEDIAGAIQRPISLSYALNRRDLLKKVSTVKPPQEPEYLADIRYLFEIKQEFKKEPDKWRSLKRKLRL

SEQ ID NO: 1078 - protein, 584 aa, synthetic construct
MTKHKIHVYTRISKTYQQEGSGLDEQLSRIDAYIKSKPEFLGSEITYWQDVGVSAFKNKNIHDGQLAEFIKQVESGSIGSGHALVIYSLDRLSRRSSWDEDTIQKLVKNGVDIHDVSTPVVLKRDDPFSKIIMELIVARGNNESKIKSERSIAGWEKRLKETREQGKVFTRKLPRWLSTDENGYVVITEQAELIKRIFLEYTNGLSSPMIARRLNEEGIKSTGRSMWRPNTITKLIKDERLRGYLRRSTDQALIPDIFPVVIDEEIFVLANRILKNNATGIKGRPRENNITREVNNILTGIVRCGKCGARVTTSKNSRGVRYVVCLNRRNYEMCGQKSIKLDEFEKIVISHAQQVDMSKVFSYDKVDTSRESTLNSELSNLEIDEKNCINDIDARKKAKKTASLVLANTLVEIQDRIEEIKQQLLELKIKEPLPEIQHFSINDLINPSNIELRMSLRKFLTQAVDKITFRSLDNNILIEIKYHNNVYRHILITDKKVKEVLHEVDIVKNGEVINYTTNGFLITENEHENTCIFHGIYNVHYTDYFLLANYIGSLKNKHWIVDKMYETENMSIVMTNEKQKSHYN

SEQ ID NO: 1079 - protein, 523 aa, synthetic construct
MVSFDSIIIYLRKSRSDDPAQTVEEVLAKHERILQDYCIKEYGKAIPERRIYREVVSGETIQDRPVMQQLLKELETDNISGVLIVEPQRLSRGDLQDCGQIINSFRYTNTAVITPTKTYNLSDEYDRKFFEMELTRGNDYLEYTKKILNRGRVASVKQGNYICSVRPYGYKKVVIGTGKDKCHTLEIIPEEAEAIKLMYHLYLDENMGFTNIARTLDSLHIKPLKSNNWSAATIRDMIDNPIYIGKVVWNSRKVVKKWENEQITKIRPRNKGDDVICVDGKHEAIIDERTFEAARNKRGLTPKVKKFKELRNPLAGLLFCGTCGHGMSLKKYVDKRSHTGKVTAIMLCNQQAICHTKSAQYDDILSKIKLSLANAISNFEIRLKEQENNNIDMHELRIASLEDELNKLYNKDVKQKDAYEDGIYTKEEYIKRNSKLQERIFSVKEEIADEKNNIPVKIDYEDKIITFKDCLASLDDSDISAADKNVLLKSCIDKIIYYNDMPSKLGIGRYIENSFRLEIFLKL

SEQ ID NO: 1080 - protein, 520 aa, synthetic construct
MNEPCLVALYCRLSDEDKQKAKKGDDSESIKNQRELLLRYCEVKNLKVYDIYVDDDYSGSDRGRPDFNRMIEDAKLHKFDMILAKTQARFARDSSLIQELLYDKFLEWNIYFKTIVDNIDTTSIGTKKSSQIIAMSDEWYLEDLSRNIRTVFENKKIQGHHIGSFAVYGYKKDPKQKGHLVIDEEAAEIVRQIFSLYAQGYGKTNIARILNESGIPNPSEYKRQKGLRYKHSGGNTGTLWKYFSINNVLHNEMYIGNMVQNKQCNISYKNSKKKQIPKSDWIIVKETHEPIIDIELWDTVQKKLKQKFKSFGNGKIGLFAYKVKCMNCHASLRSSKNRGKHYLKCETRFFHKEACQGAFISVEKLEKEVIKQLNQLNQELNCKNIEKGISLNNDLHQRIEKLKREIKKLNNDIEKTEQYLKQSYIDRLNGLISEYEYKKFSDDFQKERNNKSEQINEYKNKINELEKSLKNANERAKIVKRYINVEKLDRTMVEILIDTIYVGTNDRKNKIQPIKIEWNF

SEQ ID NO: 1081 - protein, 584 aa, synthetic construct
MTLPANTTPLRCAIYTRKSTAHHIERDYNSLESQREVCSAYITSQQHKGWMELPSVYEDAAQSGGNMDRPAMQQMLRDIEAGRINVIVIYKIDRLTRSLADFVRLMELLERFNVSFVSVTQSFDTSDSMGRMILNILLTFAQFEREMIADRIRDKVAAMRRRGKWTGGTHPLGYDVVDGKLLINEAEAEQIRHVFKRFLELGSYTAVREETKAAGMLTKCWTNKSGRLSGGTPVSNGMIYHMLGNCLYAGRVFYEGEEFEGEHDAIIDEDTWQAAKLLRAKRAMYRPYSAPSPNILLGLLHDSHGRKMVIADERKCARRYRYYMSEQSRWATRDGLKRYRCQAEQLEELVCAAIAHLLCNRELVRSGLLDLGRRGTGLERAARNSRLARRQLEIATLEQRRAIFLALIAHGEISREKIKLLIRCSELERFLLWDGRGLFQADRSAWHINESTLLLDIPANVVRFERSLVMPIERSAEPDAIPNASLVQLIREARRAQTMLDEERETSIAELAARMHRRPGFFARVVRLNYLAPDIIASILDGTQPKGLTRKRLVNANLPMDWALQRQLFGYPARQDHQRGEERY

SEQ ID NO: 1082 - protein, 565 aa, synthetic construct
MFTIMDIKMITKTAYCYCRVSSSQQADDNGGFGMTRQQATLIEYISSFGENKELGYALSPDQVVFLRAEGESGFTGKNIEKGSILLNFIEDIKSKKIKNSVLLIENIDRFSRFNVNESTELFLSIVNNGCDIHECDGGVIHHRKSDTNLISAGLTRARAESYRKSKFSIKNWDKRFENTIKDKSVLTHHSPSWLNTDGGFYTIIESEAVVYRKIFEMFNNGYGQAAIRTYLNDNGMTINGNTIGTWMIHKVLKDDRLWGRLRTKSDLRKEHDGLLIYPVVVEREIVNTAALILSSKGKSIKINKRANNIFTGLMICGVCKNGHLLVNHDKRGSYLRCSNSLSSNTRCIARGFKYGIVEQALIKFIKNIDTKILDSNDDNILELDRLGEELKYYLDYMNQVQQDFNSVDIPDPNDRKLLKNLQSKVRVLEDEILKIKSFENSEADFEVIQVASINSDLLDPFNVDLRKEFNIKLRKIIQQIEAFRYDKSNILIIIKYYAVKNQQWLLIDSKTGDMKSHTYIDEEHVVIEGVDKKPLRFDVKTKQYKLDGTQISVEDLISELKIISQ

SEQ ID NO: 1083 - protein, 566 aa, synthetic construct
MSTELQLKGDSRRRQLELSRRYAEEHELDLASEDQLEDIGISAFKGANVKEGSLGRFLEAVRAGSVEKDSYLLVESLDRLSRQPIMESLSLFLEIVRSGINLVTLTDGRVFRGGSTDFTDLIVTLTVMSRAHEESLIKSKRLSAVWKHKREKAASGQPMTHWAPAWLKLSKEKTSYEIVPERAQVVQRIFEDAASGIGMYSIAHHLNSEKVPTFSRSNGWHQSYIAKILANRAVLGEFQPGVRKDGVRVNEGDPIPNYFPAIVDEELFYSAQHGKDQRRGTSAGRKGAAFANLFSGLATCAYCQSKIIYENKGPGRKGGTYLICDTARRRLGCIATRWKYRDFEASFLAFVQELDLEVILTKTEDSTKQKEFEAELSALRGEIASVSKLMEQTYALLNAGSPVDFITKKLRELDTRQTDLAQRIATKEAEKKSFETREAQFYSSKDEIKELVTQLQGPANNELFKLRAQIASRLKGLVDTLVVAPLGAAPRMKKTIDELRTLQNGPEHEVLAYLMQVAEHPDQTRRYFAVGFRDAAVRAVFPAYNDPLHYEMQIETSQFGLHMLKE

SEQ ID NO: 1084 - protein, 458 aa, synthetic construct
MRAAIYTRISDDQTGRGLGVARQLEDCQALADKHDWQVTKTFDDNDISAYSGKTRPGFEAMLTAMKAGEFDALLCWHTDRLYRNMRDLERVIEIADAQRIEIRTVQGGTLDLSTSAGRMVARILGSVARQESEHSSERRKRANIQRAASGQWVASRRPFGYTLDGKPLEPEASAIRQAVTDVLAGKSIRAVATEWNARALPTVAGAALWRSPMVRRILLNPRNAALVVHQGAVVGPGNWEPIIDRDTHLGITALLSDPARVNKLGFERKYQGTGVYMCGVCGKRLAAFIPAAGKQRAYSCPDRHVRRQGEALDAYVSAIVVEYLSKTDITKLIEPAAVDIARLHTQRAALQTRLDELAALFAEGSINGQQLKRGTAELSNALDSLDAELAATTQGNPVAGLIGGSRSRASVEKRWAATTPDLRGKIIERLITVTVNRSPLGLRRFDPQYVDVTPKVGR

SEQ ID NO: 1085 - protein, 467 aa, synthetic construct
MRVGYCRVSTKEQAVNSHALEQQIERIKSQRVEKVYFDIDSGRKSKRVQYQQLLQDIQEGLITEIIITRLDRLTRSLADQIKTFTILEQYGVQLIALDQKTDFSTASGKLTLNMLGAIAQNESDLNSERTRHGYEYFRKQHKVHSVPLGYRVVDNNCVIDDIPFLCNIHDKKEYSKFTIARLVIDYFFDEKSLHGCLTRLNIYFGLQRLSTKQDKYSLSFSKAGLDVFFHNPMIRGHLAYFHRNKTKETVIIYNNHPPILTDLEYQEICDIIAHNRKVRGFGQIANYPLSGLIYCSSCQFSMRALKSFRNHTNPQLGHNYYYQCYNCRTGNCNNKKMIRMDVVESSLIDIFRQKYRELTKLSTTTTKVINPQIIELLQQITTLKSLPKNPAIDEAIDKLEAQIKELEFNQNNQDLSVKENQEYLKSIFSSFGFWDSLLPEQRKEIYHKLVSKIIVKDGKIQDIILKL

SEQ ID NO: 1086 - protein, 401 aa, synthetic construct
MQKILYPYVRFSSEQQSGGSSYHRQLGDILKYAKENGYTVNDSLELRDLGLSAYKADHIKKGSLGDFFDAIDSGVIETDGSAYLCVEQIDRLSRQSLDDASDVLRTILRANINVITLMDKMIYTKESLNDLMSVLYSSMLMVQANKESAVKSERILKSFDRRIDKLNNGEPIQYVGIFPGWIDNKGTKQKKDFVVNDKAKIVQRVFKMYIAGTSMGDIARIFNDKGIEQVAKRRHKNFTNSWSSAKINHLLKNRCVLGDLHIKKTGEVFKNYYPQIISIDDWDVVQSMTTTKKTTKYSGRKSINIFTGKIFCSGCGQKYYFETDDKITKKGRTLYYMLKCQGRRILGCKSKSIKYDDFLSSTPNLFGMITKTKKDNSEEIKKIKQKISDISSKTREIEKNI

SEQ ID NO: 1087 - protein, 512 aa, synthetic construct
MAELVWGGYARISEDPRDERSGVRRQREDIDAEIVRRGGESLDEARFYLENDTSAYKRKRVTITDEYGEQRQAYRVIRPVWAQALRDLRAGVITALAVYDLDRLARDPRDLEDAIEVVQHHGSLIISATSAGTDLMSDSGRAMARVMVTMAQKSSADTARRVARAHLESAHEGRPVGGSRPFGFLADKVTHCPVEAPLVRKAAQDIIDGASIRGIAEEWAAAGIKTVRGGAWNRSVIRHMLSNPRLAGWRVHQGKIATDRDGKPVRLVQPQTLAVVGEDGKPARAKNPRAGEPVEPLLDQDTFDRLQEALVRPDNRKVKPRRGARRYLLSGLVRCAVCHRQMYGNRWGETGGEMRFYYVCQGGADDKHAVSVSGHGTDAFLERVVLDRLAVEDMERPAPEFSGDGRLAQVKEAITELMSVHRTGLLSGSVVFPQVQQLQEEQERLEAERGEFIRATAGPTTVRVTPEVWAGMSTDKRRAIVETLIEAVLIHPGRQRQNKLDYDRIEVVWRQD

SEQ ID NO: 1088 - protein, 417 aa, synthetic construct
MLRQTNQQPITALYPRLSHEDELQGESNSISNQKRILETYAKQNGFSNLRWYTDDGYSGANFQRPGFQAMLADIEAGKVGTVIVKDMSRLGRNYLQVGMYTEMIFPQKGVRFIAINDGVDSAQGDNDFAPLRNIFNEWLVRDTSKKIKAVKRSKGMSGKPITSKPVYGYLMDEDENFIIDEEAAPVVKQIYNFCLAGNGPTKIARMLTEQQIPTPGTLEYRRTGSTRRYHPGYECKWATNTVVHILENREYTGCLVNFKTEKLSYKVKHSVENSPEKQVIFENHHEPIIDTQTWERVQELRKQRKRPNRYDEVGLFSGILFCADCGSVMYQQRYQTDKRKQDCYICGNYKKRTHDCTAHFIRTDLLTAGVLSNLRKVTSYAAKHEARFMKLLIEQNEDGASAGTPPRKRNWKPPRNA

SEQ ID NO: 1089 - protein, 490 aa, synthetic construct
MLREGEKMNKKVKAGIYIRVSTEEQKQGHSLEAQESMLKEFADKKGYEIYDVYNDGGYSGKNFNRPEIQRLLRDLKDDKIDVILVWKVDRLSRNNTDVMSLIDTELTPRKKSLIITSIDMDSSSPTGHMFISLLSTFARYERATIIDRVKAGMQKRAEKGYWNGGSILGYDSVDKKLIINENESKIVREIFQLRAEGKGYKFIVNILNDKGIKTKTGKNFSIPAIKLIVNNYIYSGKMVWKKHQDWSTRRRAGKADPIIVEGIHDAIIDEGLWERVQKVNELQKNSFSSNRNFNGNFLLTGILKCPKCGAGTVMSKTKKRNSDDYYLYYMCQAYHNKGSSVCSANLIEKAQVEQQVLNVISLLVNENDIINALIDELNSDNNNANGIHIVNIKMFKKQLGKAYDKRKKLDNDYFEGNIESSTYNRLMNELQLEINKLKRNIRESEREIIKNDSIINKEEVIHVLTNFNKLFKIVNDEEKKLLIRSLIREV

SEQ ID NO: 1090 - protein, 596 aa, synthetic construct
MKTQLYSYVRWSSDKQTGNSSLERQTRKSKEYAARNGLEWAELRDEAVSAYRGANWDEKKSALGGFIGAVKKGLVPSDSWLYVESLDRLSRQNVLDATEWFISVLKLGITIVTGMDEHVYNKESIAANATGLMMSIMLFARANEESETKSKRVVSHAKQLIERHKEGKPATIKSAGSHVWWIDSTGDEREGVKPHPEMWEPAKLIVEMFKEGESIFRIVAALRERYPYGFKGRDWSGSTIKNMRVNPALYGCRTLKFGLEENKLENYYPALCTEAEFYRIQEVKSNNKFRANKSSSISLLAGMRLIRCGQCGGTMNTLTTTDGKLRYVCSSGLATKGGGCTRSWSLSGILIEHCLMIVLSHAYFDASIRNQNSATDLDTQIEKFEIRIAELNIEIKNIASGIAKHYSEALVELLAAAEKERKKLVQELDRTNQKKLLLTANTVFEKDMLNFFELIQWGIISDPTHETRVKLREIVRRLMQSVVIHKRDGIVSLHYSYKEGEYFVFEGAGKRHEWTYYIKGDKQADNTVSPEIIEQVKNHRLIKDIETSLYNLETDHEGMFNLVLDMLAIVNYPKLKGSQFWPKKSSTERTVFKKPA

SEQ ID NO: 1091 - protein, 697 aa, synthetic construct
MHDFDQRPTAYSYIRMSSKRQIKGDSLRRQLELSKKYAEDHNLRLDESSMVADKGVSAWTGANLTEGAFGQFLAAAKAGHIKPGSYLLVESLDRLSRQQVRTALLPFMELINADITIVTLADNQVYSKATVDANFTQLIISLTIMARAHEESETKSKRLRAVAKNRRENAAKGVGRFSPMHVGWIDSERVGNDRWTFKLNDHANAVRRIFALADSGLGQVTITKRLNDEGVPTFRGKGLWYPANVGRIMRDETVVGTYQPTHVVEDVRQPFGQPIKDYYPAVVSEELFWRVQRGIKVGFAKGRHKGNRIANLFSGLITCAHCGSTLRLRTGTPHKYLYCDNLYRAGNCASGGGLYRYDRLEDIVFSKISELDPDQEAGGKADAQTRETLLQSVKSNEDQIQQQERAYKNYMASLALVDDDAMRREITAEMKSARTKVEQTKALVSEQKEELANIDTKRKEIASIAERMNLERLGWSTGSVEEVFDSRSRVAKMIKRFLTTMTINFDEKVLMVALAGGLRGYKFNYDGDIVDRYDMALHLGNGTSPNRLVDGALKAEHFATDIAADDFELREDRLKIIGSMSSSDQNERPSADAGGLIDTLQSIYAFRPPRHVIHKAVDGYPMWIEQIEESNFTVENIIEKMKLEGASEEDIARVVDATRQELLDRGVELRTKKPVNPRLNDPDVLALKALRKSKIVS

SEQ ID NO: 1092 - protein, 542 aa, synthetic construct
MDDKALQQTVTYIYGYIRRSRQDIERERKVDQDTLTEQRTLIEGILEDRFRHVDWDVFEEYGSGADALEARPVFLNIIEEIKSKARGTVAFAVKEISRLGRGSMTEMGFLLDLLQSKSIYIITPFKIYDPNESNDIRYLKFHMFMANQEYDIIKERMVNARLSYSKMGRWMTGGGGIPDGYKFNSYTQKLEPNEERDWVIQKIFDYYVHQGIGYNAISTMLRREGILTATGKEYWKPMVIRRLLLNPVYIGTVEFNKTMTVIENGKKKKEKRPEKDWIIVPNAHPPLIDEETFYKAAEIMQENRSSPKVRLEFEPTPLAGLIVCGSCNNKMQRQSSTQHYKRKDGNVSIYNKEFMQCLECKVYMKYNAIEEELIRVLEEDFLNVDSEILRGKLEELIDLENMQDKKRIDPTDRMAMLQKQLNDLEGEKVNLRRILRKGLIEDDDYLNDYAEVEKKAQEIHKQINLFTLQTQKEQLDELNVVKIQEGFNGVLTLYRSGELSKGEKNELLRGIFDYVVLEKTGKGKFNLHAYLNPNMLLSTASQ

SEQ ID NO: 1093 - protein, 384 aa, synthetic construct
MGEYAELRDLCAERGVLWCFSGALLDPSKPGDRLSSVVAAAFSEHESDLIVERVRRAQRANAQEGKAHGKVPFGYRAVRDPDTGKIEKRVPDEKQAPIVREVVRRVLDGEPLYALARELNDRGVSTSKQSKGWTAASLSAMVKRPTYAGLRTHLGVVVGTGKWEPLISVEEHEQIVALMSDPRRLTHHGVEPQYLLTGIAVCGECGGRIRRRRNGRYSKRTGDGSERTFYEYSSYSCFEGGCVSRRQHLVDALVREAVLQRLENIVSVDELADPEQKEAQKAARDLRKRLDDAVAEFARGDLTAARLAHAEKLLLPEIEKHERRAQKIVPPEVQRLIGPNARSQWQAMSMVDRRMVIRSLVSVTILKDRPRREFNPKSVAIKLI

SEQ ID NO: 1094 - protein, 548 aa, synthetic construct
MNIAIYSRKSLFTGKGESIENQIQMCRVYIINSIDSNAHICIYEDEGYSGGNTNRPKFKEMIKDIKSGKINRVVCYKLDRIGRSVAQLSNMFELLDRYNCSFTSITEQQFDTTTPMGRAMINIASTFAQLERETIAERVRDNMLGLAKTGRWLGGQSPLGYSPEKMTYLDEEFKERTLMKLTPIDDELKIVKLVFDSYFEIHSVSQVTKKLNLSRIKGKNGGDFNSSNVVKMLRNPLYVISDEDSHDYLTQTGANVFGTPNGNGYLTYNKRKNMNIERNVNEWIVAVSKHKGIISSSEWIKVQEILDSNKDKNFIRLGTGSKNSAILSGVLKCAKCGGNMLVKHGHTEAKTGKKFSYYTCSNKYNKYVDKCTNKNIRVDRLDRNIISQLKAFNRDKLINSLQCALSKTKMENKADLNKQIQIEIDEKTKSVSNLVNTLAQAPNEDITKIIMNQIKDINNEINQLKSSLEGNSAKKSKLDSEIKNIELVIDALKNFNDNIDFIEDVNQKRLLIQAIADTIIWDGETYTAKVKIHGLNDYENEDIDKKKD

SEQ ID NO: 1095 - protein, 523 aa, synthetic construct
MNSKVIVIPAKKKKGNSIKESEKKKLRVAAYARVSTDSDEQATSYDTQVDHYTNYIKKNPDWEFAGVFSDEGISGTYTKKRAGFNKMIEEAMEGNIDYIITKSISRFARNTLDCLKYIRKLKENNIPVYFEKENINTMDAKGEVLLTIMASLAQQESQSLSQNVKLGVQYRFQQGQVQVNHNRFLGYTKDEEGKLVIVPEEAKIIKRIYREYLEGASLRDIKEGLEKDKIVNGAGNKKWHVSNLNQILTNEKYMGDALLQKTYTVDFLNKKRVKNDGIAPQYYVENSHEAIIPKEIFMRVQEEMDRRANMVSGKGKRRIYSSKYALSSIVYCSKCGDIYRRIAWNNRGKKYTVWRCCTRVTHGPDACHARTIKEDDLQEAVVEAINQLISESSELKEIIKENIEKVITGDGTSQIEEIDKEMLKVQEELLKVANAKKDYTDLVERVEELRNEKEKILLEMAEEKNEQSRLKELEEFLDNQELEIESYDEELVRKLIDKIVIYEENLKVVFKSGLEVEIDKDKK

SEQ ID NO: 1096 - protein, 500 aa, synthetic construct
MKMKSVLYARVSTEDLEQNNSYIQQQLYQDDRFEIVKIFSDKASGSSVDGRESFLEMLKYVGISKEGNNYFVEHRTEIECIIVANVSRFSRSVVDARLIIDALHKNNVKVFFVDLNKFSDDADIFLQLNMYLMIEEQYLRDVSKKVKAGMQRKQSTGYILGSNKIWGYNYVTKDDGKGYLVPHETESLMVKNIFKEYITGAGTRTLAKKYKLSSSTILGILKNTKYCGYMGYNLKSDNPTYVKSPFIEPLISTEAFEEVQRIIKGRCNSESGRGRRIKVRNLTGKIKCECGANYHYKQRETEWCCGREGVEGRTKGCGSPQFNTKLIIPYLEKNMDNIEKNLQFNLNREIKDINVGSFDRLNQRKEELIRQQDKLLDLYLDEDKLKNISKEMLERRSKLIKEEIEEVEEKLVILNDVNSHLNNLRRIKVEYKNEIKNIRRLIEEKNLDEIEKLISKIQLETIVNIINFRKELRIKEIQFSCFNELYNTNFIFAPEPKKVK

SEQ ID NO: 1097 - protein, 562 aa, synthetic construct
MNKAFSYIRFSSPEQARGDSFERQSEKAQKWAKKEGYEIAKTWKDLGVSSYRGANVKRGQFAEFLRDVAADELPKGSVLILENLDRMSRQEPEDALMVFLAIIKKGIGILTLSDQKLYTKATMKQDRSMLLMTLMVMTRANEESALKGERVAAAWVRKRLAAREKALPLTDRIPGWLKCTRDATGLRTFSVDDKKATVVRRIFEQTEQGLGRRAIVKNLNRGDVPSFLSKTGWQPSSVIKIIRSRTTIGEYQPHRRDEDGERIPDGEPIKGYYPAVIDEALWDRANAAVAVRRKNAGGRPSTEAANLLRGLAHCGCGKRMLFLNKGAPPKGGRYYVCSAAVREDKCDNKRLWNAKEVERHLLHQIDPKRVAEAFEPSEKRTGPSPLERCDMQIAELTARKQRELDRFVENQDSIIGPELKRRAESLIEQIEEKKRTREIIAKAERDRPRLSTAEASVNSIRALTAKLDGATDKERVALRVAFIQQMRAAYFEVVFRPHAIVGLIELPGKPRSRKGLLPSRFVEVRVIDNVERFFLYHRFFGDDPEELADLGGGKGIVSPRFA

SEQ ID NO: 1098 - protein, 586 aa, synthetic construct
MEQKRVIGYIRVSTTLQDAERQRVQIERYCEDNSYNLIDVLKDEGISGAIKYRPSYLKLLQLTKEDADVVIVSELSRLSRQEDIIATLSDVNSLLQRELDIIFIDNNSYYKGGKPLELVDIMRIAIAAEYAKEERKKITQRMLSGLDRAFMQSDDVMLTGSAVPYGYCAVPNPNFERGRTPKTLLRQDETADVVRQIYQWCIEGLTIKKIQQRLIAKGIKTRKGEDFALATIGHILHSPIYKGEWTLTHNRKKTDKQGNSIEQTITKNGDAIVSEEVWDKVQVALKKNAIFEIRRISNFNPLKGILKCPCGKNLYITAHQGELRFYRCAVKKNKYDQTICANGGVNVDLALRIIWNVLKAVIVGKEFEQVSNEKVEAINAEINDIVSKIQFLNSSIRQIKANQEILIGNMGKLTNPTILLRLQTDYEEHSKDITLKEKEIEMLKVERENKELIKNQLSSDIAIDALDKLSIEDKADLFRKYLEKVVYYSERLRRGFFVITFKNGIEIIVCIHTNNKVPIAIELPSTFKFDIENRKVLMPVIKQDKNKAFTLPVAEYKPLSAKETEDLFGDNEEYLIKGVKNFPLFE

SEQ ID NO: 1099 - protein, 449 aa, synthetic construct
MSQPKIYIYRRVSSERQTKKSGLEIQVSDKTLSDLQEKYPDYSLVELANDAGLSAYHGKHLEATTALTEFIQACKSGKIPKGSILAVYSLDRLSRLKLGAAYEQVFIPIVENGVKIYSETEARIYQNDDTDYILATVLFSRAHNESKTKAKRNRDAIINAVKKWQDEKTFTANLTSAPFWIDNSTGKLNSLSESALFIVDSLIRGIGYKTISEQLQDKYPLPPQRNTSKAGTFWTIETIYKLRSNKALLGNKQVTIKDENGKQQDFTLDDYYQPLITWDTWQQLQKTKANKKRTYTDNIYLLSDLKSVLVCGECGYSMAATANKSSSNKRAKYFCCGASSKKSNHLLWKLDVETLERIVLLLINEGLEDGVKRITSPDYLRQVEEHNAKLEQAETTLEDIKTRWNSTQSPTMLDLMLQQEIKIKELQQKVDEHKALTDTVKNTDSLNDY

SEQ ID NO: 1100 - protein, 483 aa, synthetic construct
MTTPHLRAGLYGRQSAGNAASVADQHRSNAAACVQHNWSETARYSDLVSASRFGKKTRDDWAKLGADVASGKLDIVVMWDLSRGDRTVASWAAFVDQCRERGVLIHATAHGRTYDPRVPRDWRTLMDDGVEAGFDSEQKSLVVRRGMAGAALAGKPHGSAGYGYTRQYDPYDRKVYVDVPDDRAPIVREIVERCAREEPLKHIVKDLNARGVPSPRGGLWTSRVVKQFATHPRYIGLRSHLGELHQGNWDPIVSEEVFRRAVAVLTAPSRKAAAPGSNRYLLSYIGVAAPCGGFLNAQPDGEHRPARYRCNSDGCVSVRVDYLDELITRMTLERLALPDARGLFMPADAEASAAQVEVARLQARLVEARESFVGPEGISAAALASLERAVQPQLDAAQQRVAELTACAAGLELLGNGQFTVEVGTPRWRSLPLAGQRSVVKTLFEKIEVGPSVRRLSRWADREDHLLAVLERVAIERRSKVDS

SEQ ID NO: 1101 - protein, 575 aa, synthetic construct
METLKIDRSKPVAIAYVRWSSTVQGGDDKDSYDRQTSPLEFFTSSTGVPVVETIIDPGRSAFTGENSKVGKLKGILDRIESGEIRKGDFLVVESIDRITRMRVLDGVALIQDGILKKGVKLYTTTDNKIYSYEDPDKDFENLLMISLIAKRANEESEIKSKRRRSAWSKAKTKATDGVPFNAHNPPYGLRYETEENCFEIVEDEAIEIKQIFEGLKYEGVSNTLKKVNLTSKRKWSRKTVHLMLTSRYPIGSLMSQKREGKKKVFERYIENYYPAILTHKEFQDALQAMKLRGKVKDYGRNTEGYLNIFKHCVKCAACGQSLMFEKSINQKGVKYGYFHCYTRKETLSHCDLPRFRFDFAFGTLLQLVRQLTGEDVDYDVHPWAMEMPADYNNNMANDEIDIDNFGDHFLSLFSKSTATESIKSEFYGKENELAKAKSLYENLTASFSQFSDGRIPSFFIKQMSDAEQAYENAKADVDALSAQIDNAESSLEIYSYKDIIDLYSTDEGRLKLNHFFKSNGFKFVFNYEAKTRTVFMVVRDKAGAELYRVGKIFTLHNPLKEFGINNLNEHMNAVI

SEQ ID NO: 1102 - protein, 515 aa, synthetic construct
MQYLIYLRKSRADREAELRGEGETLARHEKALLELARRQHLPIADIYREVVSGETIASRPMMQQLLSEVEQGVWDGVLVMEVERLARGDTIDQGIVAQAFKLSDTKIITPIKTYDPNNEFDEEYFEFGLFMSRREYKTIKRRLNNGRQASVKEGKYVGNRPPYGYERIKIENDKGFTLKPLEKEAQVVRMMFRWYAYGAHGISTIADQLNEMAIPSKTGKQWVYPTVRDILQNPVYIGKIRWGWRGQRKRVKNGSVSVSRPRSDDYLLADGIHPPIVDQQLFDQVQKKFSTHKPLPTSAREMKNPLAGLVICAKCGAKMQRRPYQRQNIRTGLICPNNKCRNVSAPFDDVEQMLIEVLAEYIKEEKLRISNGHTQIDDSVLQILQNQLTDLQEETVDLNKQNDNIHDFLEKGIYDVDTFLQRSQKISSRITEIEEKQKTLQQEIIEENKRIESATSIIPMTEQLLLQYENMSALEKNSMLKEVLRCVKYERECSIRDGGTADNFTLYLYPKISHK

SEQ ID NO: 1103 - protein, 517 aa, synthetic construct
MRKSTKTNDGITAIYVRRSVSDKDKGNNSLSISAQKEECIRFVGECDYRIYCDDGKSGKDVMHRPAFMQMMSDAREGLISRIIVKKYDRFSRNMREYLNITDELDRYGVTVYSLSEPFNTETKEGRMMRNNLLNFAEFERETIAARVADAFQTKARETGFYQGGKVQFGYTPERRTINGKTGSVLVPSENAEAVRVAYDLYQHPENSLTDIIRYMTENGINASRPTPRTKTGISNLDRSHLSRILENPLYVRADKEVYRYFLSKGYEMLDEIEAYDGIHGLFVHAGLDDTHFVKVAYHEGLVPAETWLRVQDRKSHQSKFPTNGKAMNSWLVGMVKCACCGYAMHFNHCANRKGVVYHRFIDYGKFTLNGCPTPPIQLKPRQVEDAVLQEMQKRIEQLKIAKREDSKPDTETESIKTEIIRIDGEIQKLMEKLADADSVLFDYIQKRVSALHEQKSELDKKMQTMCRKRKAIDTKPLEEPMKQWDKLTVQEKHDIAAAMIDVVLISDETGIEVKFSI

SEQ ID NO: 1104 - protein, 474 aa, synthetic construct
MSEINSAPNSPLRVCPYARISDTDEERAPGIDRQLRTVHPLIASRGAVQTRDYTDNDKSAYKPEVFRDDFEAWLQDFIDDKNDGIAAWDLDRVFRQNTDLERVIKAYCDAHFKQKRSKPVLWLPSMTLDLTDPDGQTIARMLVAVANQSSAKTVKRVTDFYRDEALKGNIFSNYPAFYRNKDGSINAEKAVITFKAIEDVFAGVRPTAIADEWRTKGITTARGGRVSGETVRRILIDPGIAGLAVYRKELLIGTDGEPIKRRDGGLTDEATWRAVCKELETKPGRRRKPTRALLSKFLRCGLCGSRMVRTRKTDTFFMYACQSVDAGGCARVAISGPKLDKQITALVLAYLNQPIDAAEEKPFEGQARLDEVTAKIAELMTAYRTGAMSGSIVFPSIKELEDEQKVLQGQAAKHVRMKRKVTTAADEWDDIGLERQQAIIGEVFEVIVIMPASNPKSGVYEAERAKPVWRSPEK

SEQ ID NO: 1105 - protein, 562 aa, synthetic construct
MEKRKLYSYIRWSSDKQAKGSSLQRQLETARRVAHENDLELVEIIDAGLSAFKSKHLKHGNLGAFIEAVKAEEIANDSWLTVESLDRISRDEILKAQRLFMELLELGITIYTGLDNRIYNKASVTDNPTELMLSIMTFSRANQESMVKSQRQKSAAQLKIDKFKAGERAENGYPFAIRSSGANVFWADVSDGTVKPHEYYFLIARLIVNLRLKGWGYMRIAKQLNENYTPPKGTAKRKHFKDMWSPKLICNFLQSRTLMGEKSIRVDGVEHILKDYYPQVINEKEYYNLQNVINRKLANEPNNYIPLLTGIRRFKCECGAPMVAFFQYNKIRYRCDGMKSLDKRMHCGAKSFNGAAIENAIVQICADKIFKDVKRLRSNVGAIQAMLNDAQKRHKRGMDILLNDNAPQGLNIMLVEIEKDIEGLQKQLNDELISDAGNDTSVSWDAVPENYKDVFNLERLEIKQKIQASTLSIVCTTIKTKGHLFDIKFNDGDVIRFFSDKRSIHVDIHSINNAALLQSDGIILHDHFDYLLDSEEFIERIRLKHQQMKSMQERTLDELFDI

SEQ ID NO: 1106 - protein, 497 aa, synthetic construct
MSTDHQRYSTENQAGAIQEYAQKNNIEIVRTYADEGISGLTFKGRPGIQRLVADVESGNVDFELVIVYDVSRWGRFQDVDESIYYEVRCRLAGVRLVFCGEQFANDDNIGSKFHRLVSSSSAREHSRVLSTKVHMGQTTLIRKGFRQGGPAGFGLRRLLVDDVGNPKTELRRLEHKSIQTDRVILVPGPPEEIEIVRRIYTDFVERGLSEPEIASHLNRQGSLTDLDRAWTRNTVRQVLTNEKYIGNNVWNKRSFKLKTKRVKNDPDLWVRAENAFEPIVDVELFQAAQKIIATRSYRPNNDEMLEALQRVLKRHGYLSGLIIDEADSCPSASAYQSRFGSLLRTYKLIGYQPDRDYRYVDINRRLREQYPEVITNVVSRLQETGARVENDSADSLFVVNEEIRASLVLSRCHISAFGRARWFIRFDTSLAADITIAARMEPGEKGIRDFYLLPALDCSGDKLRLFENNTNELDVYRFDTLDALYHLVKRTRIKDIH

SEQ ID NO: 1107 - protein, 556 aa, synthetic construct
MRAVAYCRVSTDREDQKNSLQNQIDYFSEYLNQEGNIEAECGVLCKKDKTLTPLRGIYADEGLTGTRLKNRQAFQQMISDAKRKTFDIIYTKSVARFGRSVEDTAKITKDLKELGIGVFFLDIKVNSLDNSKEFLINLFSALAQEESNNKSSSIQFGTRKAQQQGKWTTGNPPYGYDIVDGFLKINNKEANVIREIYDLYFNHGYGTSKIARFLMANKIDSKKNTKWSQITISRFLENPIYTGKQIQHTIQTTDVNRQIKVKIDKEKRIIHQFEHLRIIDQDLFELVQIEKQRRLKNFGEIIIKEVITLDDSNETYKEYKRLLKRGTGRYSGKHLFSNLLYCGGCGHTLKRKKRHTTKKRDIGYEWCCHLNDKYGKVRCPYRNSLTEDSLNSYIINIVNQRKLKLDDLKSDFEMYMQIYLNTSDVEDRIKTTQDFLVKLNKKRNINFDLYGDGDITKEEYIHRNKEIEEQLSEAKNELNKLQNIDFEIETLKLKYQKFIQELSEIDENNLTNPVLRRLISKLNVFTEEDGKKRIEVIWNFIDKSEEEIAEHLKGAF

SEQ ID NO: 1108 - protein, 548 aa, synthetic construct
MIQTNSNHFSFKAAIYCRLSKDDEQKGESASIQNQKELLENYVKSRGWSIYDVYIDDGYTGLNTNRPSFQRLIRDIENKKVDIVITKDLSRLGRNYLQTGYYTENFFPKNNVRYIALNDGVDTFQENNEIVPFKNVLNEFYSRDVSKKMKSAYMTRARQGKFIGCLAPIGYRKDNEDPHKLVIDDETSWIVEKIFDLAFSGYGVQAIRRRLFEEKIPTPTWWNRKKGLRNKKTKLEMTVDGGEYWWDCTTLKEIIENPVYIGHIASQKVNYKFKVGWLSDKPKEEWIIVENTHEPIISEDIYNIANEKLKSRRRPFKNGEESIFAGIVKCPDCGKSLNLGRNKSKKREKLLTCNTYRRYGKSLCSQHRIYYDTLYEIVLKDIRKNAEIALKDEKEIIKALEKSREVDNEEEQKFIMDKIYEDQIRVEDLTKKIERLYDDWLDNKISESNFQKILEKSQKEQDYLNQRIEDNQKLIVKEDLEDINVKKWIELIKKHKDIKRLDKETLNELISKIYVHEKEVVNGEITQTIDIYYNFIGNTDTLQVFYNL

SEQ ID NO: 1109 - protein, 459 aa, synthetic construct
MSTTHFYSHYPTIEYKTCALYVRCSKEEQAKFGDTIEAQIEDLKAFAKLHHLKIYAIYVDEGHTARKKYNKRKEFMRMLQDVELHKFEYIIFTKLDRWFRNIADFYKIQEILDNNGVTWLTALERYEMETTNGKLNVNIRLSVAQDEADRDSDRIKDVFRLKVKKGEAITGSLPIGLMVGENGKVDIDPDTVQIAYDMFDYFETHNSKRGTLLYLIDKYNRYFCYETIARALRNPLYKGEYRGNPDYCPKIIDPARFDRIQVLGKRNVKVRKNNRYYVFSGLAQCKECGHALVANTTVQKKYNREYTQYRCNYYSNSHLCTHSHGMNEKVIEKYLLDNIKPELEKYVTAYDVKQNAPTKKADPNKIKTKMQRLKELYINELIDLDDYRIEYEQYKQELDKLTSTAAPEVKDLSAIRSFLALDLQSIYDSLTPQERRTLWSSIIDKIIISDGGDIEIVFL

SEQ ID NO: 1110 - protein, 463 aa, synthetic construct
MQAVIYTRISRDREGAGLGVDRQLADCQAVAEQFGWTVVEVYSDNDISAYSGRPRPSYEAMLEALENGRAQAVIAWHTDRLHRSPLELESFIGLCDRKGIDVRTAKAGVIDLSTASGKMVARLLGAAARHEVEHNIERQKRAKQQAAVDGKFRGGRRSFGFEADGMTLREPEAQAIRDATRRILAGVSIAQMAREWNAAGLVTSFAGKSWTPRDLRIVITRPRNASLVTHEGKIIGDGQWPSIVEPDEYRALVAMLADPARRTSPGGQRKYLGTGLYVCGKCGAKMHTARHVRKGSGRARGYRCSASPHLNRIADQLDEYVTELTLGRLAMPDAAIALGGEAVVDAAALQVARMGIQDRLDELAGIFADGSIGGSQLKRGSESLRAQLDEIDKQLAAARSASTLAELVLAGDDLRAVWERLSVDVKGKVIDVLMTVTVLPSGRGRQPGGSYFNPDYVRIEWKA

SEQ ID NO: 1111 - protein, 521 aa, synthetic construct
MTATTIPTAIPVAIYARVSTDRQGDSIEHQVSFLREYVSRNLGEGYYTDDTLIYSDEGISGYSTTILDRPAMKQLLDDAKKGVFKVVLIKELTRFGRDDEDNSRAINILEASGVRVKSNDGYDTEQQHTKMLLKFKNILAESESERISTRVAIGFREKVRSGRFPLSDKHTPMGYRLNHDSGKLKIDEQEAEIVKMIFDLYVNKRIGTTTISAILNDKGYRTRKGTLFGKNYIRLILLNPTYVGSLVYGKNKVQIQRTYDENYNLSKSKKMVKSNDPIIVENCHEPIIDNDTFLRASEIMKKRNKQQTVSNRAKYPLTGISFCAKCGGAMVCQKKTSEWRGKRYTSRYYRCSSTQNYGDRKCTQNGINAEKLEKTIYDDLLEEFTKIKEGKYVIDNEIEVRSHKERLEKLNKEREQLKKKQVQVVMNMDLFDDEGSTEILLGLKQKIQTVDEQIFITKRQIIESENHDKNVSKVKDVIESMKAIDLEDLGALKVLFHDVIEEVRIFDKQTIESIQYKYSFV

SEQ ID NO: 1112 - protein, 585 aa, synthetic construct
MIALVHLSFLSLLFASLIIQKGAVVRSAKAYSYVRFSTPKQAQGDSYRRQLQQARDYCTTHNLVLDDKTIEDFGVSAFRGSNRTDGALGRFIDAVKGGEIVRGSYLLVESVDRLSRQAIEEALTQFLEIVREGIVIVTLSDNQVFRSGEVDFTKLIVSIVYMARANDESEMKSRRSRAAWSNGRQQARDNNKVIANSRLPSWLKLEGDKIVPIPERVAIVNEMFQMARSGQGYQQIAKVFTENDYKTFGQGKVWRPAGIQSVIKSRTVIGEFQPHVIVEGKRVPEGEPILDYYPAIVPPSIFAEVQHIVDKRSNHSGSYRKGLYNNLFSGVIRCQCGELLRFHNKGSRGQVRNYLVCPMEGVTGCQLPYLLYNKIEPQLLQAISKLSVVMKQRIPQTEKTSLLKDELAVLRGQLEIETRKSKKAAQAMLELDDDAVFRSLYEECKANCQSLEEKILQIENEIVGLELSTRTLFQLLSPEDLSNTEQRQRFNSQLKLAVKIEFIYEHSGLVVVIKNLEDEPLLEQAFGHKLMNSIVHDFEGHVVVKTISDSPYIDPSWADEEREEYTKGISAEFDQCGDFNIDNFK

SEQ ID NO: 1113 - protein, 588 aa, synthetic construct
MDKAVLLCRVSTEAQDYEAQISDLKKYARSKGITEFHVIATKESGFLNISEREGWNQTKEYFEEHPDYDTLIVTEISRLGRRETAIAEIKEYLERNKKSLYIKDLDLHLYDKGNKNPQSDVVFMVFTSMATSEMSIKKDRFMRSKRVLSEQGYSIVGKVLFGYKRVRDEVRGKNKFIVNEKEAKEINEIYNIYLYGINGKDVGIKGLVLYAVSKGMSHYLHSKRNMTKMLSESAYIGGIKEVRIKKKNPEYWKFNIHTKPPYIESVSHIPYPAIVSKSLFDAVQQRKLDNRILVDKSVKHETILSKLIECPECHTFFMGDYRSDRHHSTYRCHKHKGTGKCSNGSSISMSYLDSLVWCYLKTNVKQIIEEIYKKNRDVDITVIENEIFNCLEKKRSLQEEIKTQGTIFKNEVRVLGFDEAQRKYERAVSKIEKRMNEINEMIDSHKKKIDEIKNMCSTTFSNEDLDRVEKDKKRISEYIHLLVKKVLVFNFKTYTFVRVILNGDDERTFRGIFANKRDNNRIKVFGFKREKNMPITVRNKESKSDNGDIIEWVESGWEVLEGMLLMDDIELYPIEFNRLDVYDNDFKK

SEQ ID NO: 1114 - protein, 503 aa, synthetic construct
MCYGADAIYARQSVDRADSISIESQIERCKAEVINGPPQIFIDKGYSGKNTDRPDFQRMMAEIQAGKIRRVIVYRLDRISRSTLDFATMIEAFQKYNVDFSSTTEKFDTGTPVGKAMLMTVMVFAQLERETIQQRVVDAYLSRSRRGFYMGGVVPFGFQLEGTLIEGKKTKMYAAIPEELKIVRLVYELYAQPQVSLGDVVKYLTAHGIKRKDGKDYTRSGIRNIVVNPAYVRADHRLYEFYKAQGATVENDLSDFIGINGAYLYSGNGNGAKTTSLDSATLVLAPHEGVVDSGTWIKCRSKCLNNRMVAKPIKAKATWLAGKIKCASCGYALTAKTYHCKTKKDNRYYLCTHRYSSGNCSFGSLDADVVDEAVYQEISKKLSEFKTLSRAEQKTANLQVVKLTARIEQMDQEISTLLDRIADANSTVMSYINSRVAALDKEKKQLHAELLRLSESGSGSLKQISDYMERWDEISLEDKMTVVDCVIESIHASKEKIKIIWKI

SEQ ID NO: 1115 - protein, 489 aa, synthetic construct
MKKTLNEMKNACAYIRVSTDKQEELSPDAQKRLLLDYAKSNHIMILPEHIFIENGISGKKADKRPQFMRMIGMAKSKERPFDVILVWKFSRFARNQEESIVYKSLLKKCGVEVVSVSEPLVDGPFGSLIERIIEWMDEYYSIRLSGEVMRGMKEKALRGGYQSAMPLGYRMNRETKIPEIYEPEAVIVRKIYDEYSGNGKSYLEIARELNTLGYKTRRGANYEERTIKYILQNPFYTGMVRWNRQNHNEHTIKDESEWIISQGRHEAIITQEVYDLVQEQIVKRSRPYKAHSTGSIKHWLSGMVKCSSCGSSLNGSVLSAGGKVTSFQCGNYSRGSCMTSHFIKAEKLEQAVYAAFEQVIKTNEFSYEVRTPQNEADDSLLLNRQLEKLDDKEKRIKQAYRDGIDTLEEYKENKQLLADERQRIEEQLSALTDSEPERKEQLARNIRSIYDIIRDESLDKRTRANALRSVVNVMVYDKAEDTLSVEFYI

SEQ ID NO: 1116 - protein, 501 aa, synthetic construct
MMTGGCMTNDSQLVPVVAYARISADLAKDGHGVDDQHKVNDETASALGLKIVHYYTDNDLSAAKAGLVRPDFEAMLRTLKVGHLPDGQPVRGALVVADDRLVRRVGDYERFVDALTYEDGRVYADAKGLKDLYNEDVESMGLFGVVIAKAEVRKIKRRTRRSHRRRAEEGIPVGGKRPFGWQDDKLTLEPEEAQHLAQAARDVIARKSLHSILAAWREQGVRTVHGNEWQSRSLKLALWNPRLCGWRKHNGELVRDASGVPVVGKWEAIITPKEWMAIDALFSARIGPNIKADGTVTDYRTPSHLLTGILRCGKPKDDGQICNAPLRVSTRPDLSGGYVYQCQSRSMGGCGGSARNGAKVDEYVTEAVLAKLEERTAAKSQVSSEWTGQEELDRLMVKQRKMLQAWQEDQVSDELFFPENHKMESRIKELRKERTQHALQVQRASVVTENIREQWYSGKLDMAQKRALVREALHAVIVLPVGGGGRRPFNPDLLVPKWTEG

SEQ ID NO: 1117 - protein, 513 aa, synthetic construct
MYSTMPSDWLCCGYLRKSREDELRDREIETDTLKRHQSIIEDLAEENGHAIRQWYREVVSGETIAGRPEMTALINDVAKGLWNAVYVVEASRLGRGGGSDQEKIVNAFRYTGTWLITESDGVYDPDSKADMKRLRNDLRKSEDELDDITTRLIRGKAKAVKEGIWLATGRAPYGWRAVRVKGLWQLEPDENHSNMLRIYDMLEAGDGFATIAATFNREGIPTLRGGEHWTPSSIQNIARNPANCGYVVYGVHKTRRIFDPDTFEVRKIKEKNNKPLIYKGLHFEKGGITPERFERIIGRKAHDARIHKDRQLRNPLATLLRCGKCGKCMTVHLLNAHKPSKAYYFMHKPDKRYTGTCTGVKGVKVDMIMELLADALEDMCNNIEIQLSDDREDDYEERRAQIIREQEKAIKARDRAMEAFEAGIYTLDDFAERKRSIEERIARLDEALAQCKPREPKEDTIVNLKECIRAIKDDSLSIKAKNDLLKSFIDHIDYYNGETRPRHHDIRIEVFLR

SEQ ID NO: 1118 - protein, 484 aa, synthetic construct
MAGKTPQRAAIYVRISDDREGQGLGVTRQEQDCRALTERLEWTLHPHRPVYSDNDIGASTKSRKARPEFAELLAAVRAGTVDGILYYSTSRLTRRPMEYEGIKALVEDTGVRLASVVSGQVDLTTADGRLLGGIMAQFDAAEAERISERVRRTFVQHREAGRPHTTGTRPFGYKPGGIKVDAVEAAAIRDAVEWITDENVQASLGDVVRAWTAAGLETVTGRPWSRVMVSKVLTRPRNAGLVEYLGEIVGRGSFDAILTEDELRAVREALAARSGLVTARYSRRQHLLSGLIYCGVCGGRMKVSARRDAEGAVRADSFVSCVKDNGGCGHVKRNLRLAEAFILGAVERRLADATAFADPDDDSEAAQEAARLTAERDTLRAKVERLQKLMLDDPDFTAEDFVPMIRKLRDRIREVEALLADVELPARRDALGEDPLADWQAGGFDERREVLEALVAQIVLHPIGKVGPARSRAMVPETTQIIWR

SEQ ID NO: 1119 - protein, 650 aa, synthetic construct
MYRPICYERVSSFDQVLSGSGLDDQRSIIDQFLDDNPENFTKNRIYITDEGVSAFKNANISAESNLGKFLQDVRGRKYGKGDALIVTSLDRLSRRSSWSENTIQFIVTSDIVIYDISTGLVLKKDDNFSKILMEIILQRSHNESLMKSVRAKVAWENKVARAALCGEVVSNRMPFWLENVDGKYSVISEQAEIVVKCFEWYVEGLSTGEIIRKINDPKWQMVKVSRLIRDRRLLGEHKRSNNEVVPNVYPIIVDSDLFATANRMMDAVMIPKKKPAEKMEYVPEVVKQIFILYDSGVGTGTIVKQIEPGWSTVNVLRVLRDKRVVDERIIDNLTFERVNQKLTKNGVAERIRKDIKIAKDDYITNLFPHILKCDCCDGNIAIHYNHVRAKYVVCRTREEKKQCDSKSIQYIRIERNIISTVMNVDFTKLLIEGNSNNNFKVIDALKIELDALRLEEQSYQSKIADRKVAGKKTSLPLMEGLTDVQDRIEETLEQLEQASVTRTVPDMSYDIESLLNPLNVELRAKARKELRHVLSKITYRVIGKHIVVRMRYFTDVLEHVLIIDNKRGSVGEVVCQIAVHNKDDVTTYETASFKLIATDEQLTIEVLQMIVLNDYVLLLNYIDGLKDGHSTNVAMWMREHMNEVLTNTLM

SEQ ID NO: 1120 - protein, 544 aa, synthetic construct
MSDTHIRKAYLYSRVSRASQATDGMGIERQVESSLKFLAMHPEYEVDHSTFIQDSGVSAYSGDNISDSAGLGGFLRAVRDGLVERGSLLVIEAPDRLTRLGIRKGQRLFDELAEYGIDVGLVRFGVIIKHDEENDFTSSLIVSIGLYLGHLESKQKSERICATMQKRRNLMREGELTYTPNSPKWLQASPDGKSFEIAPFGKIVQKMFQWRLEGIGTSKISERLNSEGHLDSKGNKFTAPKINQYLRAKSVIGHYQPHTSKKVNGKVKREPEGPPIVDFYPRLIEDSVFYEVQELMDNAKGGPKEKYVNYLRELVQCPCEGCGHSFMHVAVSGGKYQYLRCTTQYKKELTSCEAKPVNFKLVESEILPALRVLDFMSIYKQSPINNGLSKQLKEDIKELTQSIKTDREALGFLKGASRSAVEAVITENERKLSEMQVKGITDDVTVNPKDIETAQLHIRDNPLDSPEKRMEFNNSLKRLIDKLVITPKNWTIHFKGVDLKLTLAFGLQNADEILKTFYRERNRLSEEGLTPQEIHKITGLEVAN

SEQ ID NO: 1121 - protein, 569 aa, synthetic construct
MAAGYTRQSKAKADKSEASPQTQDDATERKARERGCSFKGHYRDIGVSGYDPNAKRKAFERLLDDCRAGLVHEIIVFNVTRFSRREPRDAIPVVLELFDLGVTITSVSEGSFAPGPDNTMELIMLIMRLDAAYQDSQNKSQAIAGTKQKAKEFGGWTGGALPYGMESYAESVTREINGKPVTVTIRRLRPASVREDGTDQAGEVVKMFDRIFEFKDKPWTGKKNAHPASVGAIVAWLNSRKVLTQKGGPWRERTVKRLLTDPRLAGMAAEPVYSRDKGGNQTRNVTGYRILRDENEEPLVIGEALIPQRRFFEAQEWLAGRGRGNRGGTPSKYLLTAMERFYCECGRPKTGSGDVYKCSRPAGVSEEGTHEGGSTIQRADVDYYVASRIMAVITNADADDPETLDILTEATVRLARRNESPEIRSERAALLGERSDIVRSIEQLYSDLRMGIYDGQIGRQQFLADKSSLETRLRAVDARIVVVGDSDLPPLPIEEWTDSEDGNPLGPNSWWARADIEDRRMLVELFVDRITVAKAKERGGTDRTCRVEDRVTVVMASSSADADEGHEAA

SEQ ID NO: 1122 - protein, 648 aa, synthetic construct
MTSTAPSGSEPAGYAYIRHSTKRQGGDDKDSVSRQKTSIRALAKQYGLEIPDQNFYYENGVSAFSGKNRTHGKLKELIDQIDGMRIRKGDYVFVESIDRLTRQRLLQAKELVNGLLEKGIILVTTLDNQKYQKATLENGIDDLTQDILLSVISKRAWDESNTKSIRRKSAWNKAKEAAEKDLKPFNAKRPPYGIQFNELAGKFELDPVKSKEVIAVFESLKMQGVTNTIKLINQTSVHKWTSQRVKDLFITKYPIGYLYSQKKIDGQMVFDKYIENYYPQIISFQLFEEARLAMQGRKGSKSIGRVAADNSNIFRHTAVCDICNESMFFSNNSNGKAKYINLNCRNNFESTNKCSNRFRFDLAVYVLFEIVRRAEIINKLSSNYTPKPNEKSPLDDFYDEFGVIQSKGIVQPQRSDFSQNNKYVWDFLYNPQKHISQSIYLAEKFSKIMQGNSEQKKFHKENVDLLNEKAQMQQRIESLNKKVNSLVLADADIPDVIVMQLVNAKKRITAIDEEIAQLTVQQATKATVKIETLSEFESLFKTDEGRLKIITFLNSSGLSFNFNYDKKSRILTTTLYQEFDPLEEPEPINHIWTDRKFKRAYRHRDKMRLREIVHRKELTTVETYYETNFAPMRPYGYENLGEFLMNQK

SEQ ID NO: 1123 - protein, 506 aa, synthetic construct
MFENNLKTAAIYARVSTTRQAEEGFSLPSQIDACVRKAKELGISNIIKYVDNASGTTLDRPALTIMRKAIREKKIDIIICYDQDRLSRNLGQQLVLTEEIEKYCQKLIFICGDYHNSPNGRLFYAIKGAIAEYEREKIIERCIRGKKEKYKKGKTSNSHLFGYQYNPITELYEINTDEAVIVRRIFKLYINGMSSRQILRQFQIENIPKYFQGKNVGWNDPSAIMRILKNDSYTGVFHAWKHNSHNSLKKAPKQRYKDTSEWINVPIPAIISEEEFILANQIIKENTDRSTRNEKRIHLLSKIAYCTCGRKIYVRPNNNKDYYYCSSKSYKKRNEIDIPFCPIAKYMPADKIDNIFWDTLTKICISEDTLQKYINRQQEDSNINEIQQQLLDLKTLLQKKQTEQVSILEWYSNQLIDEDVAKLKLLKLKNIITELKSQQQILSNKLNNKNKPQKIYDIFKQERKITLEEKRNLIRKIVDRVYLKRTDPAISSNKYDIEVDLFIIFK

SEQ ID NO: 1124 - protein, 407 aa, synthetic construct
MRIVGYARLSRASRDESTSIVRQCELIDSTCQARGMQLVETVVDDNVSATRSRLDRPGLAKVRQMIRAGEADAVMVWRLDRLVRSVVDVGVLLDEGLQIISVTESLDTSSSMGRAMVEILQVFASMEAKTIGLRVSASQEHLRRVGRFPGGVVPYGYRTVPHPDGTGRALEPDPVEAAVVRRAADEVLGGASVYATCARLNADGIKPRRAEQWGPTALQRLLRSNHVLGRVTNRGELLRDPGTGLPLVFWKPLLPVADVEALRRITEWQPTPGRAEATKAGRRRTRASRLLSGMLQCPGCGGNLLAKTRKSSNDIYACQAAAQGRVCGGGIAVECVRVEAEVERQFLQAVGRFEFVEARTTVRDVAHLSAVDESIRDTTDALRDSTADVPALVARLQKLHAERERLD

SEQ ID NO: 1125 - protein, 494 aa, synthetic construct
MNNIAIYMRISFSERDRQKQTEESINSQRNIIKHFIFNDQELKKANIEEFVDEGYSGSTTSRPGLDKLLLKIKQGKVNCIIVKDMSRFMRNYIEMGDYLENIFPFMGIRFIAINDGYDSSNEIQNGTELDIQFKNLLNDYYSRDISEKMTTSLLVAKKQGKYTSGTPPYGYLKDPEDNYKLVIDERVADNVRYIFQLLLEGHTLNETAKILNSEGVITARARRKEIKGYDAYANRWESNVEETIWSHSMVRRIANNEAYTGTFVFNKSTKSKLDGGKVTYHPKEEWIRIYDNHEALISKETFDEVQELLKSRHRKSFGVNKKKYQNSPLATFVRCSKCGYKIRFNISSNGKELVGIYLYCYHCRMLEQEEKLPNYKELEKDVFEILKDKFHIDRTEKKRLLDEQKELYDKNDLLLKKKRIEFENYKFGKISREDFLEIKNQIQESDEENKERIQAIDEELKQAGNIDKLTEDTVRKYIKTIYVSGKGIEKIEYQ

SEQ ID NO: 1126 - protein, 502 aa, synthetic construct
MARVLGRLRISRSTEESTSIDRQREHVELWAKSNDHEIVGWAVDENVSGSVDPFETPGLGPWLKTDRLVEWDILVAWKLDRVSRRVVPLNALFGFLDQHAKSLACTSQPIDLSNWAGRLVVNVIAGVAEGELEAIRERTQDSRRKLRKVGRWHGGTVPIGYQKVRLDSGGFGLAVNPETAPIVQEIAARAERRESIRSIADLLNERGVSAPRGGLWTAQTLTRMLRSRWIIGEIEYNGRPVMGDDGLPVRRSLSEPLISPERWETIQAVLDDQKRPKQRRNEPGLLLNVAVCSECGEPLYHTVMTKADKGTEKIRTYRYWRCSAKSKRKTRDGNPVCTTKYAVPAVMLEQIVEEMFLADIGDVERTEEVYVPAEGHGDEIAVIDRAIAMARREYDAGIYDGDDNAYFERITTHRANRDRLAAIPSLPARWVRQPTGETYSQAWSRMDVRQRRELMIDAEIVVRARMVGPSVPEVAFHVDHARLQVAVPGFVPPALASQSNAK

SEQ ID NO: 1127 - protein, 547 aa, synthetic construct
MTMPPFAAGRFPERNQWVQTVIYARYSSKFQDSRSIEGQLADCRARCAREGWTIIGEFHDAAISGNKGITEEARPGFYAMMQRVMAGGIDQVLCDTTSRIARNERDSIEIREDLKFVGCRLFTLQKGVIEGITASIEAAVDAEQRRALAHNIRRGQRTSVDQGRVPAGIAYGYKQANRLTERGEVIRGLREIDDDQAEVVRRIFREAAAGRSAFAIAKGLNLDGIAGPRGNYWMAPTIYGNPKFGNGILRNRAYIGELVVGRTVSVENPRTRKVSYRPLAKEEWRTKQVPELRIVEQEVWDAVQAEIARRSIGPAHAQRRPRHWLSGLGVCSECGSPYTRAGRDQWSCAKRSKGGACTNGHTVETKRYMAALLDALTNDLMHPDAFDEYEAEYREARKERLSSQRREQQKLERKRGEITRKIQRLADAIANGAGDVSEIVTLLATLRAERSDIERQLDQIEAVELIPLLPGVREKYRREMAALEEALASPEASLEAVPRFRALIHRVVLSPNPAGRGALITVEPRIDEALRLATGEAPPQALRRKAG

SEQ ID NO: 1128 - protein, 477 aa, synthetic construct
MTMCAVYARQSLDRQQGIDIQLSSARVEAERRGWTIVEEYVDNDTSASKQRGPSSAWGRMLRDATAGRFEFVMATDLDRLLRGQRDLLDLMEAKAKPVLLSGQLDLASADGEFRATMLAAVARFEVVRKAERQVRAADARADRGIPHRGVRPYGWETDGITIRPDEARWVRYVADEIQRGASIASVTRALNEQGVLTTRGNAWSTITVKKMAIRARNAGLLERHGERQEQSLIEPIITIEQLEAVQAILGARRGTPGPQPIVHWASGLASCAVCGAALRGKHVTTKDGRSPWYICETKIKRATNDDRRHVSISGGILEGVLAEAVAAAFLFGGDALGGTADSPANAAHTALSGLQARQAELVGLVSEGLVTGAQIASELRGLKEQQAQLEQTIREAQSRDASMEMLSALRGDLLAGQRVAFGDALLAREALLERFKGMSIERRRQLVEQLLEVTVEKGKGGRRVRIHHRVVESLNEA

SEQ ID NO: 1129 - protein, 453 aa, synthetic construct
MTQAALYLRISLDQTGEHQAIARQREDGVALARARGWEIVATYEDNSISASDRRKDRPGYDAMCRDFAAGRFTALICYDLDRLTRQPRQLEDWIDAAEERGLQLVTTNGEADLGTDAGRLFARIKAAVGRAEVERKAARQARAARQRAEQGRPAKGIRPTGYTITGEIVPEEAKVIRRIFTEFLRGDTLKGIAAALTRDGVPTRRGGKWSSSSVSSVLRNARYAGRSIYRGQDVGPGQWPAIITEGEFAAVAGRLAAPERRTNKTDRARRHLGSGVYYCECGLHMRSSSGQGPGKNRYTCRDAHYYRTGAAIDEYVEAVVRARLAAPDLKTLLVKPADRTESDRLDAQMKELRLRAARFDSDYDAGTIDGYRYRSATDRVRQEMDGVARAQARLAAQDEGGILTAPDPVAAYNAAPLAVRQRIIGWLARVTVLRAQQGRRGFDPDSVRIEWND

SEQ ID NO: 1130 - protein, 537 aa, synthetic construct
MTKQQARLRVRLYARLSKDDGDADKESNSITNQLQMLRYYSKEKGFEIIDEYVDDGYSGTTFNRPDLNRMIEDAMEDTQPSGIMVKDMSRFGRNNAMFMYYVEEIFPNNDILFIALNDDVDTRYEDNEMMPFKSIMNEYYARDTSKKIRSVKKTTALSGGFCGSFAPYGYRVDPNNKRKLLIDPETAPIVKRIFEMSKQGNSVHQIARTLCEEKILIPRAYRAMKNGTLETSTGFRFPTDWVGKNVKMILENQVYLGHMVSHKTQTKSFKNRKLVAVPKEDWIVVKNTHEAIIDEETFELVQKFISVKKRPNKTGRPNMFVGLVKCPDCGRNMAFSNPNGREPRFRCRTYARNSNLCTTHAISYDALVKIVMDDIQKHIKNMETLGDQFIEEMRVLSESGGGKKIKQFKQELELAEKRIAEIDSIIMKLFEQNVAGKISDGRFEKMSVTYENEQRELEERRKALKEKIEAEDYKTKNTNQFLETIRKYENVTELNRSMLVELIDSIYVYQAEGTGKERTQKVEINYRFLCESQCGIA

SEQ ID NO: 1131 - protein, 465 aa, synthetic construct
MKTALYLRVSTQEQATTGYSITGQEEKLRAYAKAKGFGNIKVFTDAGYSGSNTKRPALELLIKEVEQGKISNILIYKLDRLSRSQKDTLYLIEEKFLKNDVPLISLSESFDTSTPFGRAMVGMLSVFAQLERENIKERMIMGREQRLKKGLWHGAGGGSGRVAGYDYKDGKLVINEYEALFVRRMFQLYVEGEGYFNIYKKLSKEMPGVIKEPSNISKLLKNPVYIGMIDYNGEIYKGIHEPIIDEHTFNTVQKLRQTRTTNRDMSITRYLLPKLLKCGYCGENMIGKTGSKKKDGTYYTYYCCYSKEIKRRKKHVDSNFSLECESVYHTAQLVEDKVINEVMNLDSTQIIREYETKNDDHIIYEKQIKDIDAKIEKLMNLYIDSNIDKKTLDVKHKELEDEKRLIEKTMRDSKVDVNKEVVLKHLSNFKDIDWVDDREALKNSLHILIKDIRIYNDSMKVNFNI

SEQ ID NO: 1132 - protein, 504 aa, synthetic construct
MSSNRPRALVGARVSVLSGPQKVSHEAQIDTATKWAKAHDYPVVGAFEDLGVSASVPPDERPDLGPWIRERSHEWEVIIWSKLDRAFRSMRHCSDFIKWAETNRKVVVFAEDSMTLNYLNPSTGIDSILGELFVQIAAAFAQIELNRFKSRAEDMHRAIRPTTRWAAGLPPLGYQVVDHPSGRGKGLAIDSDAANLVREMADKLVDGWSFVRITEWLNESGKLTSQGRSREARGLEPKGRWTTTNVIEILTGYRTLGIKTHKGQPVLDDDGEPVRLAPPLFTPERWDEVQRAAQLRKGKPRTPSETANPMLEVGFCAVCGSSLAQQFAKSRPRKSDGHVIHYRYYRCSRTPINCKAVFVVADDLDELLSEQFLLERGDRRVTERVFIPGEDNSYELDFIKDRIERLREDRVAGLFPSGEDELVFRNQMKQLLARREELESVPVRQPGYENVELEKTYREVWPGATPEEKRKMLIDAEISIRLGESPGKSLRAELVVNCMSATPD

SEQ ID NO: 1133 - protein, 573 aa, synthetic construct
MTKKAAIYLRVSSIDQNYERQEIELKALAKCLGYEVKYIFEEKRSAVLKMDTRDELTQMRKLTKNEIDRIFIWDITRLSRRAIDFITLINEFTDKGICLHFKDKNIITLDEDGKQDMFVSMYLYILGLFAQMDAENLKAKMRSGRERGLAIGHAYTGCAPYGYKLINKQLYIDEKEAETVRAIFNNYVDGKSIQHIIDILNSNKIPTRTGILWTRNSIYAIITNPVYKGKPELTSITKRDENKKPLEKITRVFKAPVIIESPIWDEAQVQRKKHKSFIDKSKEREALLRGILQCGNCGKAYCTAINGSGVPTYICSDNRANINQKLNCKNGGVACYFLDSICWQTIKDIYAYKNFQDTFTKEKAKNQQLLQENQTQINNFIDKQIELDKENERVNKGYRIGIYTDSEAIRAKGEINNNKARYEKMIEELKAQNSILTAKIKQDFSHYKIPTVELSYEEKKAVCKELIETAKIYSYPPNNRIVQLQLKMGLIFNIVLNPKRRLYYIIDNSTVTFNNPQSAPIFLREELKDKDFTVTCDNNDYFNEEIFGEYSFAQMWNIMDKYGYIQDYPKVKK

SEQ ID NO: 1134 - protein, 481 aa, synthetic construct
MKAALYIRVSTDRQNEEGFSMEAQHDLLMELLEKKGMELYRVYSDPGISGRTIKKRPGIQRLIEDMKAGKFDAVLIHKLDRLSRNLGDLYDFIAMINKLNKRFVVASLGSEEIDTQSPMGKAFLYFNGIFAEIYSDNLREETLKGLTKKMENGGLHMSKAPLGYDIEVIDEKRQLVVNEYESELIKEVFRLYLAGKGVVSIAKHMNGHSRGKEGGVWDSKYVRIVLQNHTYTGHNHFKPVLWEESKRIIKPGEHEAIISMEDFLKVRKMMERRGENHMSKHSYDYPYGGIVKCGLCGATYIGNASRQTLADKTVRVYRSYRCRNQYSNKTCDAPGISEPHLQQLIFERLQITNKKLQDKKTNAQAKSDQRMLQKEIEVSNRRRKNWMLALGDGKLSPDDYANLIDDEEARMKAITAQYEEKEDYYINELSTEEIKDMMANLKDNWVLIEPETQKLLVQSMFRQIVIKKESDRWNIIQMLTV

SEQ ID NO: 1135 - protein, 432 aa, synthetic construct
MFKFISRFARDIQDGINMKRELDSLGIGMIFIEQNIDTKTADGELMFSIHLSVAQQESEAISRRVKFGRREKAAKGKFNGSLPPFGYIRNESILELDPRYSLVVKDIFRLYLYENMGLYRLSQYLNSAGIPTPRTIAGAKNAGLLWQQSTIKLILTNPLYTGNMVQNRSETISLRTKKRKLIPSDQQTVVLNTHPALVSMEDIHEAQQKLKKKGERRSNDQESFFAHIAVCADCGMGMHFKKDRGGYTCGKYGKYGKKYCSSHYIKADDLLTKVKQHLKPLTTGTQIKTRRLVDIFKKESGCSADNHDKDLRQVESKLAQLTKKQSRLLDLLNEGELTQEEWRIQNTLVRNENTLLSECKSELMMQVKKEKDLNTNIQVFEKQVKNLLHLDIEDEQILKQIVMKLIQKIEVFDDGSLKIHYNITNPNLIQGA

SEQ ID NO: 1136 - protein, 557 aa, synthetic construct
MKSYLYSRISTLQQVAGFGIERQIQTVQDFLKYAVLDERLGYQLDPDDFELLESDLGKSAFHGRNWLPGASLGNFYIDVIEGHITRGALIFENIDRLVRQTQYQALEKLITLINRGIDIVEVETSAVFSAKIPDSTMMLNMSVTRAHQESKRKSNMATKSWKNRIEGYTTGTKIKSHNLPEWLSVVDNKYVVDEELAAKFREVFQLYSTGIGAAEIVRKTGWPTVRVHLVLRDTRLIGRMTVGKKRGKGKEEIFENIFPCVIDKELFAHVQVLIKSNEATNKQRATTKTIGNIFKGISRCPYCKEVYVTISSGGVKPGWKQFHYFNCLGRRHSKNDVCKPFSYTIIEKTLLTYIKGIDWAKVYAGDTDTTVIDLLRNKIVVIETTIKELESELVNADDEEVLALVRVLKKKKAERDSINQELIGLSTQRVAEVDYDISDVCNRDNVQLRVDVNVALRKMIKCIWMRKVDSIVIARIDYYTDIACHYLVIDASTGDLLNFATVDSELMIRSNLMDLNLITGEETRYPERANEWDQIVWNTIEEVFTNAFEQAKQIRKS

SEQ ID NO: 1137 - protein, 469 aa, synthetic construct
MYIRVSTDEQAEQGYSIDAQKEKLTAYCVSQGLDHFKLYIDDGYTGTNMERPAFRRMVRHIQEGKISAVIVRKLDRLSRKQKDVMTIIEDIFEKNNVSFTSTTELFDTSTPFGKAMIGVLAVFAQLDRDMIVERTTMGRRQRVNTGRWYGGRVPFGYKWNKELQELEIVPEEARIVKRIFQMYSEGHSRLEIAEWAASRTNERMIDHSVIRDMLERVVYIGKLRNAGQIVDGLQEPIISQKLWDAVRAEAVKRKDGALPKGDFLLTGVMKCGVCEGNIVHVKRCTKVKDKEYNYELYACKKQHVRIKDRVGKCNLGYFRRENIEQFVVDQIKFLATYPEKITELMNEEKEMPDDEISYEQLQAELKKVNTNLENLYDAIESGDLKASSVSDRIRKLEEKRELLENDIDELTDNKLPTADEKTVRAVISDIGSAWDYFTEEEQKTAIRKLIKHVVLEKDGRHHIEWIFSF

SEQ ID NO: 1138 - protein, 521 aa, synthetic construct
MKKVQVIPATLRSYTKKLMDSQKKRRVAGYARVSTDHDEQLTSYEAQVDYYTRYIQSRNDWEFVGMYTDEGISATNTKHRKGFKRMIDDAMDGKIDLIITKSVSRFARNTVDSLTTVRKLKDKGIEIYFEKENIWTLDAKGELLITIMSSLAQEESRSISENVTWGHRKRFADGKVSLAFSHFLGYDRGMDGNLIVNKKQAEIVKLIYRLYLSGYTFHSIAKELTERKIPTPAGCKIWRANTIRSILMNEKYKGDALLQKKITVDFLTKETKKNEGEVPQYYVEHNHEAIISPQVFDWVQEEIKRRRKGKKRYSGVSIFSSKIKCGQCGGWYGAKVWHSTDKYRRTIYRCNDKFKRHCQTPHLTEDDIKEAFVRAANRLIENKAEIIDNVTLLKERLTDTEALEEERDKLSTDLNLLADKIQQLIAENARVAQNQDDYDRNYNELVSRYEAAKTQYDKTCEAIQYRKARSRQMDSFIKELRNQDLIKEFDARLWGSLVDFITVYSKDDIRVTFKDGTEIRA

SEQ ID NO: 1139 - protein, 520 aa, synthetic construct
MKNKIAIYVRVSTTKESQKDSPDHQKWACIEHCKQIDLDTADLLIYEDRDSGTSIVARPQIQEMISDAQKGLFNTILFSSLSRFSRDALDSISLKRIFVNALGIRVISIEDFYDSQIEDNEMLFGIVSVVNQKLSEQISVASKRGIKQSAAKGNFIGNIAPYGYQKVNIQGRKTLIVDIEKAKVVREIFDLYVNKKMGEKEITKHLNENAIPSAKGGTWGITSVQRILQNEIYTGYNVYGKYEIKKVYTNLKNIGDRKRKLVKKDQELWQKSEKRTHPEIISQELYKKAQEIRQIRGGGKRGGRRKYVNVFAKIIYCKHCGSAMVTASCKKPDKYRYLICSKRRRHGASGCPNDKWIPYYDFRDEVISWVVEKLKKMINSETGSEYSINFVSSINQNIGKEIDKINKLIESNRRLLFELRKSKMLGEIDEKQYGFEKEEYEKEILQLEEKLIKLTENERHDKDFEKIRKEIKQSVDELVTMGNYDDVEKTRIILSRLIQRIVVDSDGQIDVLTPLGVVKD

SEQ ID NO: 1140 - protein, 635 aa, synthetic construct
MSKIIPHVYMRVSTRGQFKSGGGWDEQDRQTKAYIVNRPDVFDTENIHYITDEGVSAFSGSNVTEGKLGDFLELVKCGDIGEGHALICYSIDRLSRQNTWAGSQLISTLVTAGIEIHSVIDNRPLRKNDQVGAIISTIELMRSNSESMVKSERAVAGYQARLTKSKKNGSVLTGQMPRWLFNKNGMYAIKSEMKLVIDFIFEQYINGVSTGHIADELNLKGWQYKTYWTDSIVDRLLNANDSQMIEGKKNKSKVHECREYISNAYKNDFTLSQIAEDLNGKDIPYTMTAWRGTFVARLIRDRRLIGEHTRYSKSVKGKKRDVIERVSNFYPTAIDNDRFNIANNMLTAVAGNIRGRTRISYGDTTQLKNIFSGILVCGQCNGAISVNKNSKDGVQFIRCRNRYELKACDARDIKYSTVENNILTHLKGINLDELISSPIDTKLELLKSELVLCLEEEQEYLNNIKKRESEKLRIRPTTIQALEEVQDRIDELSREIEVFEVDNFIPTFDVELNRITDQKNVKERSLIKKGISSVVDVIKYYRLDDGVICIEMVYKAKILKHFLIIDNKTGSLLTQSSLEDINGAFWLRSSFCDIDFSTNKVVYHRPPTELDLKIHNMLSRLLLNTVEAMRKDLDP

SEQ ID NO: 1141 - protein, 502 aa, synthetic construct
MIAIYARQSVEKKDSISIESQIEYAKREVFTEDFKIYQDSGYSGKNTNRPAFHEMMADVQSGRIEKVVVYRLDRISRSILDFADFINILESNRISFVSATEKFDTSTPMGRAMLYIIVVFAQLERETIAERVRDNYYARVKKGAWGGGPAAFGFDLVKTTIDGKKATICQPNEQISVVQRIFELYALPYSSLADVQRQLIQDGSVSSGGVNFDNAKLSSILKNPAYVRADTAVYNFYKAKGAILANPPEDFDGVHGCILVGKRDANERKYKDVSNHLLAMGHHEGIVDSTAFLFCQQKLSRNRQIKNTYKGKHSWLTGLVKCAHCGYAFSIRFSKTKDGQVPYFCCSGKYLHKACTAKQTHRVREIEAEVQASLIQHAASYNLIHRQNTDAAAKELQSRISEIDAKIENLILSLESVSHVSAQYINQRIEALHHEKQLLLHRYNETISEYNINEVTPFSATDWEQMDIEQKRQLARSLIRTVYLSEDGLSVSFNIKKGGHKP

SEQ ID NO: 1142 - protein, 471 aa, synthetic construct
MNVIYLRKSREDLNSEDTLWKHRSTLVELCKRNNWEYTIFEEIGSSDSLDKRTEINKVIALAEEGKIRNVICMDLDRLSRNTFHSTYIQKIFRDNNVKIVTPTKTYDLNNENDILFSELQNVISAQEYRLIRKRMMQGKELGAKEGNLVGGTTPLGYYYDRNERIVKIDEDESKRYRWLIDNFLTGVFSTRTLAVEFNKYYVSKRGNKINCSSLHRILTNRFYLGEIRFKGEWYKGKHQPLITLDEFELVQKQLNGNSIVPLRQGYKKIKPLSQILRCGYCGHTLSVTVDKRYGNFIRCWHSDIITGERCCQKGIKESIVLEVLDAEIKSHMDSLRDAINNGGTEHQNKKINTLQSQIESIDTTIGKLETKKENTILMTQEGILTLAKCKEELAKIEKEIKTFNDDKQLLQKEISSTNKDYKKDLIRFEEVYESLKDATAEEFNTLIRTLVNRIVLKKEDRYTLEVDIQFI

SEQ ID NO: 1143 - protein, 508 aa, synthetic construct
MQKYVIALYIRLSIEDYKYDSLSIENQGLVLHEYAASMPEALNAEIMEFIDNGYSGTNFERPQVQKLIELVRANQIDCIIVKDFSRFGRNSIETGYFIERVFPLFHTRFISISDDFDSAKFKGDTGGMEVAFKYLISEYYSRDMSIKTKSAKYAKMQRGEYQSKICPYGYRKSADGRMEPDPEAAAVVQLIFSLSAGGMNAAAITRELFRRGIPTPGEYKAAHGNHTHDISRCHGIWSTSTILRILADERYTGVYVIGKRAVLEVGGTRSRLKDRESWYIIPDHHPAIVEKAVFDTVQASQLRFSQPDKKKRDYPLKGKAFCGCCGHALSRTMNKTSYYYCRHSEADEESRCHKMRINAAELEQAVFLTLKKQMEATAPLAPDGTLRADTSVPERAEYEQQIEALQDGKRTLYERYLMDEIDLNTYKAEKAACDELLLKTKNAYATVLAQAKQKQDEQARQDSRKEASKAIFDADTLTTELAELLIDRVLVYPDKRIEIAYKIQDIFA

SEQ ID NO: 1144 - protein, 515 aa, synthetic construct
MARKVTTIPATRTITGQPVTQTTKRKVAGYARVSTNEEDQANSYQAQIDYYTQYINGHGEWEMVEVYTDEGISGTSTAKRAGFQRMIADALAGKIDLIVTKSVSRFARNTVDSLTTVRALKEKGVEVFFEKENIWTLDSKGELLITIMSSLAQEESRSISENVTWGKRKAFKDGKVHIPFSSVLGFCKGTDGGIEIDPETAPIVERIYRDFLEGASPLKIAKALTADGIPTPRGAKEWQTSTVRSILTNEKYKGDALLQKRFTADFLTKKLVKNEGQVPQYYVEGSHPAIIDPDVWELAQHIMKTSSGAGRHDRTFSRMVFCEHCGGLYGAKTWHSTSKYKRVVWKCNRRYEVDHPGKTPTITDEMLQAAWIDALAELVKRRSLIDWEELHAVLADTTEVEAELMVLQGELEVVTELMTRAIEDNKVSVQNQDEYWARYNQLEESYTHTAAKLSEAQELLARRQACGIELGRMRKAIKGLNPDALEWDEALFHLITEKIVITTRGQIKVDLKLES

SEQ ID NO: 1145 - protein, 619 aa, synthetic construct
MARSKPAPSSAKPARLRCAVYTRKSSEEGLEQAFNSLDAQREACAAYIASQRHEGWGLLPTLYDDGGYSGGSMERPALQRLLADVAAGRVDVVVVYKVDRLTRALADFARIVAVFDARQVSFVSVTQAFNTTSSMGRLTLNVLLSFAQFEREVTGERIRDKIAASKRKGMWMGGLPPLGYDVGERRLVVNETEAETVRHIFRRYCAVRSVRLLQLELAQAGILSKQRRAADGGHFGGQPLARGALYAMLANRLYLGEVVHKGQGYAGEHAAIVDAALFAAAQAILAQNRVERDSGAAADAPSLLAGLVYDAQGQRLTPSHTLKRGLRYRYYVSHSLVTGKRHPARSSGSRTFGDADQSDVGVADAPRAGCQRLPALALEALVTGRLRELLGSASALHELMREHSAAEQQRLLAEGAALAASWHEAPAGEQRQRLRVCLRRIVVRADGIELQVDTARLLQGFTGSWCLPDAAAEADADARALSQANASGGDDGELDRGAVLVLRVPAVLQRVGQELRLVIPGKSTGSAPDASLTGLLARAQQLRERIFGEAQLSIDDVAREEGLSRSYVTRLLRLSFLAPDIVARLLSGEHPPELTATRLMADTRLPMDWSEQRKLLSLG

SEQ ID NO: 1146 - protein, 492 aa, synthetic construct
MLFNNENIKHVAVYLRLSRDEENQGIEQVLANHRQTLISLCNENKWSYELFEEVASSSTIINREQMVKLLDRVEQNYYDAVVVMDVDRLSRNEFDASLIKRILLETETYIVTPYRMYDLTRDDDSLLLGITNLIASGEYKQILKRMRRGKEYAQKQGHWTNGIAPLGYTKDTKTKKLVPNERAKDIQFVFSEIAKGTTIPSLIRQLNNMGIKTRQGYDFKYNSIVRIVNNEAYKGTIVSNKTIGQYNPRPKEEWIVVHNVHPAIVDEATWDAANKIVNEYSFKAPRSKNRIYPTSNLIYCANCGKVQGCNNHKRLNKIYIKHCKCGNRSFYYNPVLAMIKEEVLGYKENILKALETLEEGKHEDDTQYRKEKLFSQLNRSTKALNKINILFEEDEIDIITYRERKAKRQEEIKLIEEQITALEREDKSTKIETLQEQIKSIEKLVDKWELLDGEGYSDERVNRLLHGLISGILWSFKKGAESPTLTIIYNGE

SEQ ID NO: 1147 - protein, 594 aa, synthetic construct
MVRGTAVIYARISQDRTGKEHGVARQREDCLKLAAEKGLRVVDVVVDNDVSAYSGKRREGWRRVLEMIDSGEVDTLIAHHVDRMYRQVKDLLELVEILKYRDVGVITVKSGDIDLSTSAGRMQAGIGAQIAQTESEQKAERIARAHLQLAEAGQPKGGRRPWGYGIDHITIVEPEAEAIRDAAEMIVDGRTLRAAADHVTARMSEQKAELSVLLPDGAVKTNMSRTALREVLLSPRIAGYRSHLPQRERERLRRMRARSATRGGFPWNDLVCYPAVWKGILTEDMWRAVRGILLDPERIGGKKRPRRSMLASLLRCGRCLKDMGEDGEPVVSTLGYGPKGYTCARCGSVSVHPAPIENLIATKVRERLARSPEIFLEDPGLQSEEHLLTRQELAERKRQGLVEMYVRHPGATTALDAGLAQVEAELAAISAERDERDRQILLRRRAHSLLDAWDESDAVTRGTLIGIAADYFVIEPLGRTGCSFQPGRVIAHWADAPDEPERLGPQPRTQEDIARERAARDAEKEVLRLERDKAAELRYEAELERFHQREREREAELTAQLGRAPDPLDLARRGPANPPKERRGSRRNGRQSRG

SEQ ID NO: 1148 - protein, 501 aa, synthetic construct
MDLKERIKRVAIYLRKSRNNEGEESEETLAKHRKRLLDIAKKNNWAYEIFQEVGSSMDNNRDEYQRMIHKLNDGIFDAVLSVNLARVTRDDSETPKFMSLLRQEDILFVTDSERIYDLEIQEDWQALKFTGFVNNWEYENIKAQLRKGKKDSARMGRWANGTPNYGYIYNRLEKKLEIDEEKAEAVKLAFQMCINGIGVDNIAIALNQLGYRTNKGNLFWGNSVKRMIRSPIYKGWIVSNRIKGRNKYQGKLRPKEQWIISKKAAPIIIDKETWEKANNALDKRKALSPRSRAQKHGLSTLIRCGICGRVHAISRRSDRGGARVFQSCSKVNLLGEKCYNSGIMYDVMMELIIDNIKEKREQIAMEITTLPNDKQTIDLKQIKIKRIKEQIKKIEKALHMLQLQLEEDLIDLNYFKERKSKRTIELDNLKTELKNLMDTTQEDEVKSKESFLNKMDSFLSNWKQLDESELNKELMSFIDKVTWYSPRGSKEPPQLKIYWSE

SEQ ID NO: 1149 - protein, 565 aa, synthetic construct
MAREKICGYCRVSTKDKEQLSSFENQMSYFQREFGESDNYELVELYSDCGRSGTSLKRPGFDKMIADAGIDKSKMDGDLYLVTGKPKFTRILVKNTSRFARNVSADMLIKTLTQNGVHIDFIDTGLSTERAADIIVVQMLQVLDENDSRDKSRKVLFGIEEGIKRGNIHTHGNLYGYKYYPKPENRLEIIEEEAEVIRLIFDLYVNHNMGVHRIRQHLIEHGVFARSGKPFSERGLRVMIQNETYSGRAVRKKFTNGLIFNKHATRETGQAIIFETDKIPAIISIETFEKAQAVLESRVQHSTQKGIHKGKTLFAGKIICGCCGSTYYASSSDYIKSAGGRVRSYACSKKRTMHKDKDGNRVMLCNNRNVSETVLNEFVYGISYVSSIYEKASFGSLALYSLSVALLSRINKQDVKAINELKQQLELVQEKKKKLLGLYLENSFSKEQLDAYLEPLDAEQIELGAKINSLSKSNDEIYADIKEIEESVSYLNTLKDKAEREIESGQFTATKEEIVADIEYITVREDGKLAVRYKAFEEIERLMDKHRHFIPIEKQIEFGIARRVS

SEQ ID NO: 1150 - protein, 479 aa, synthetic construct
MSNDASLDINQKSNPVQTVAPLKEDNNMLRATDKITALYCRLSVEDTKEKGGKDDPSNSIQHQQIMLMEYAKSRHFPNPTYFIDDGYSGVDFSNRPGFQKMLAEIEAGHVEVVITKDLSRLGCNSSLTGLYINYTFPQYGVRYIVINDHFDTIDPNSTDSDMAGIKNWFNEWYAKDTSRKIRAVNKAKGERGERLTTNVPYGYKRDSDDPKKWVIDEEAAQVVKRIFALCMEGKGPSQIAALLEKEKVLNPTAYKQREGRKTPHQTPENEYRWHESTVAYILEYMEYTGCTVNFKTYTNSIWDKKQRENPMENRKIFYNTHPAIISLEVFDKVQEIRQQRHRRTATGKSNMFSGLVFCNDCKQKLYYSTTSYFEKRQDFFICSTHRVNKDKCSGHYIRAVVLEQIVWKHIQEVISVSLAMRLISVPKWSKSSVCRAKNRCGCIRSGWHRLRNESESLTVFSSAFTRTMLSVGWTMNASP

SEQ ID NO: 1151 - protein, 521 aa, synthetic construct
MMMTKSLPKIYLYSRISSLSQQSGTGLQQQRNQQPLLSELSHRYSLPISNETFEDIGVSAYKGNHLQASFGKILDAISSGRIAKGSILVVFSLDRISRQQVNLAMELFLSVINKGVSIYTTSDNMLYDHNDEHISQNIILSVLTMQRAHEESRTKSKRTRGNALTIIKGIEANDPAYFQDGYTRAIKSVGSHPWWLDISSGYVKPHPKYFPIARAIVKRIINLESTITIFRWLEKNYDAPPRSRGKWNPVLIDKMTANTMLTGKRILTIDGSDYNLPNYAPAVCSEKDFDLLRATRSGKYKKDNVTKPKVTGLLNGINTLKCGICGGGMSCNRSGKYYRYACINAANGTAKHPQWGTPIEPIENYITQQARLRAFNNIAQPASDNLKSLLQNQSDLTSQLEQLEIEYQEYRADGLRPPRVLVAELSDLESQLEQIQESIDAERITTAKGTLPNVWRSLFTDYAEADFLDKQQVDLRLQFRNVLRHMIDRIEAKPTGRKDGNRNIIEYVVKWSNGDTTVTSL

SEQ ID NO: 1152 - protein, 555 aa, synthetic construct
MELKNIVHSYNITNILGYLRRSRQDMEREKRTGEDTLTEQKELMNKILKSIEIPYELKMEIGSGESIEGRPVFKECLKDLEEGKYQAIAVKEITRLSRGSYSDAGQIVNLLQSKRLIIITPYKVYDPRNPADMRQIRFELFMAREEFEMTRERMTGAKYTYAAQGKWISGLAPYGYRLNKKTSKLVPVEEKAKVVQFIFNIFLNGLNGKDYSYTAIASHLTKLQIPTPSGKKRWNQYTIKAILQNEAYIGTVKYKVREKTKDGKRTIRPEKEQIVVSDAHAPIIDQEQFQQSQDKIANKVPLLPNKNALELSELAGVCTCSKCGEPLSKYETRRTRENKNGTESVYHVKSLTCKKNKCTYVRYNDVENAILDYLSSLSNLDNKTLTKHITSMISKYEDVNSNVKTKKQMSEHLSQKEQELKNKENFIFEKYESGIYTDELFLKRKAVLDEEFKELQIAKHELNGTQKAQSEIDSNTVRNNINRIIDQYHIESSTEKKNALLRMVFKEVIVTMTQKRKGPIPAQFEITPILRFNFSFSTSPSLIVPQNAVHILKNR

SEQ ID NO: 1153 - protein, 595 aa, synthetic construct
MYAKKRYWKIVMKSYLYSRISTLQQTKGFGIDRQVQTVTDFLKYATIDSRLGYQLDVEDFEVLESDLGKSAYKGNNWKPNSSLGRFYKDVVSGRITSGVLICENVDRLVRMSNYEASNKLSTLITNGIDIIEVESGMCFSNKIPESATILNMSISRAYSESKRKSDMATKSWANRTNKLKDSGRAVSKVCPRWLTVKDGQYVLDEKQAETLLYIHQMYLEGHGNSALVRRLNAAKRLDNGKPWTTITLHRVLRDERLTGRMVMGKTRKPIPLLDDQGNKIIENGKVKTYVPVEIIDDAYPVVVPRELFNQVQAMISEKEGSKVKKTTKYMRNIFNGVSRCSSCGEALVADKNGHGKLFYVCLGKRHKKACNSVGIPYEAFERTMLENLSQMDWQRIYTGNTDMEAMNQCRVRLVAVEREIAELEGELESSDEDMVLALVRAIKKKKAVRDEIHGELNSYVKAGTDNVTFNPDLKRVLNQEEVELRQDVNVELRKIIKYMKVGRMDRTITVQLQYYTDVVSHLIFIDSKTGDLLSRSHLTNDLIYESDSVTIDLTGGTWDIKGDKFTEWDQFALEVWKEIIEQAVDQAQEILKNRI

SEQ ID NO: 1154 - protein, 538 aa, synthetic construct
MTPGLRYLACLRLSADSDGSTSIEWQRGVIRHHVSSPHLSGVLVGEAEDTDVSGSISPFKRPRLGKWLTKRVDEFDVIIAAKMDRLTRRSMHFNQLLEWAQENGKFIVCVEEGFDLSTPQGKMMARMTAVFAEAEWDTIQARVLSGVQSRLENRSWLTGAPPTGYRIKVVEGDRRKVLEIDQDFHPYVEEIFSRVRDGQSTHRIARDFNGRGVLTWGDHLRQLKGEEVKGTQWQSTIINKFIRSSWVPGIYAYKGEAVLDDQGEPVILPEKPLASMSEWTELIDRIKPTPKPVGAESRAGSKSLLAGIARCGNCGAPVSSLRNSGHTRKDGERIPGHRYYRCSNKFKGGDCAIGLYVRADLLDTWVDQQIQASVGTWGMYERAGTGPSQARELQSARVRLEKLEADFLAGEYDGEGQEESYRRMHKGLSAKVALLLRQEEERVNPPLKATGKKYGEVWESKDQEDRREFLRAHGVKVWAWDKGQDERERGMVMDLGDIQAMANGLALACPGKKGKMTRVVISHNATKEYRRKVLGFAK

SEQ ID NO: 1155 - protein, 491 aa, synthetic construct
MKRCVLYLRVSRTTEESVSLARQEAELRELAQREGWTIVAVIRDDGMTGTKERERAEAALAMIADGEADILVSWELSRWSRMGLTAVAKLVTVLDARPDALLVFHKEGLRSNMPAFGILAAVIAEVARMEAEGTRDRIRSMRAYVLGQTAPEDQRWLGGRVPVGYRAVPREDGAGKRLVLDEDAAAHLREAARRLLAGHTLTDVTAYLSASIPTPQSGGAWRITTVRKLMQSPTLLGRSTQKVEVGKRSDGSPIIEYRVVTDAQGLPITRWEPVLDAGTFAAVQELFRRRGPNQPRKAASWLSGYLYCGLCGSVMYANSRKDRTVDSFRCANKAIPGQVCPGVSISRKGVEDYMEGVVFGMVGSLKEYRVTERIEGPDPSRLDDVALAIEDLQRALAADGADYGKLLPQLDGLKAERRRLIEAPAKTVRTRTATGRTLGEAWEDGGIPEKRHIIEDMLDSVTVKKATVAGRGGHIEDRLDEVWMDLPSEDD

SEQ ID NO: 1156 - protein, 485 aa, synthetic construct
MMAAREARRSVPAGRRAIALVRVSMESDKLTSPEIQRHAIQQHSDRRGDEIVEWIEGIDESGSRKKSAWWAKLDYAVERVERGEVDVIYVWKFSRTARQRLKWALALDRVDSAGGSIESATEQTDPTPSGRFTRGMIGEMNAYQAELIGEVWRETHERRRRNGVPPTGGPRFGYQRVDGRYEPDPVTGPILADLYRWYLSGMGSAQLTRKLNELGVEDRRWTYQGVMGLLDSGFAAGLLGRTRPKLLPAWEREYTEGIHPPLIDMETWHAYVARRQQRYRKQTRTPRRYLLTGLVRCGDCGSPMSGKVFDGRPTYVCSRSTTTDLVKRVTMVAWRVEKLVDEWLAVSADKYARAQAVEATRRKSTRTQTVANSIRRDIEKQNDRLVRLSDLLIDKIMTAEEYRIKADEIQARKDALERRLSLAVVNPVQAAAPADLPDEIMQLWPTMTVEQKAGTLRPLIDRIVIYPAARRGAVDRHVKIIGTWE

SEQ ID NO: 1157 - protein, 493 aa, synthetic construct
MKTCIYLRKSRADIEAEKEGEYETLHRHKTTLLKVAKERKLNIVDIKEELVSGEYVEHRPRMMELLEEVKNKKYDAVLVMDLDRLGRGNMQDQGLILDTFKTSKTKIITPRKIYNLDDEFDEEYSEFEAFMARKELKLINRRLQRGRAKSIEEGKYISPDAPYGYEFKYDDRGKKYLAINEEQAAAVKLVFSMYLENKGATKIANKLNALGYETNNHIEFKAKAVRDILSNITYCGYVKWKTIDRKNHSRLRPDGEQIIAKGHHEPIIDEFTFNKVQEIRKGKYISPSKNKVSNPLAGIVICKKCGHNIIQKISRGKTYLWCRHCDNKSSSLDYVEDAIINSLQGWLENYKIKIDLKDDTEEIDQIKFELKKLQRELKEAEKQKGKLYDFLERGIYDDKTFLERSNVLESRIDDLKNQISECNLSIISYKDNLQAKKQIIPSLEKVLYNYSRSNDAKEQNLLLKSVLDKVLYEKAKDASKDEFILEVHPKLPK

SEQ ID NO: 1158 - protein, 624 aa, synthetic construct
MSELSKFSPQTRVAIYNRVSTEKKVQMEALDVQVAYTRKLVEDNHLTIVDQYIEPETGTEAEHRLEYQRMIRDIKADRIDLVVVKCSDRLCRDQAEWHNFVKLHLQKKFQLYFYLDDHIYDHERDDIKYSVQAIVDAEQSKITSKKIRDIHSNRQIYATGSKALHICRPLYGWDRNVEFIDENTKRVWWTVNEKEATELRYALSLVEQGIGFYRLANIMYDRGVRSKGTTGYHKMPSVRIAANTWKKMLTSPMLHGDCILHKEVSNFYTKERVKLPQEDWIYKENVIPPIVSREYHEKIVQIIDARRFQMGCCKGLAGTYKWSNRLACANCKKPYYRMHYKLNSEKVITWKCSEQFQRTRSACDNMVIAEKELEKQLAAALKEKYAYLFHISSGLINDTIHTIEKALCNSDNGKKLKALETQRELLLRNKDVLFHKLMNGVISDEDFGIYKDRLEKELRELEEKIEGQKDGEKSLADQYRRLQQIRDTIENKNYNEQAILEILYGCVEVIEIHNNGDMDVTMSRELMRSKFELYSIVESDYGLFHFSFTYKKETIYDRNRKAYNEKVLELIRSEKYITIPQMAEQLGNTYSYTWHSIQQLKEQGRIVYIKEKFEHSECYWEVVE

SEQ ID NO: 1159 - protein, 479 aa, synthetic construct
MRTALYIRVSTEDQAREGYSISAQKDKLQAYCLSQGWDIEDFYIDDGYSAKDLNRPGIKRMIDHIQKGLIDCVLVYRLDRLTRSVLDLYKLLEIFEKHNCKFKSATEIYDTTTAMGRMFITIVAALAQWERENIGERVKIGLQQKVKEGGWHGGIVPYGYRYTENGLEIDEEEAKVVRLIYDLYLSGKGDHKIAGILNRMGHRTRNGNEWTGKVIRDILQNPAYTGDIRYMGEVHQGFMTAIVSREVFEQAQKSRESRRGKHPRRNASTYIFSGVMRCGRCGALMNGKANYSRYKGKRLHYKLYVCINTRTGACDMPLLNEADIEATLIQFLSQYRDDVLSLEVANTMDKKDNIQEEMKSIENQLEQIKKRKRKWQVAYANEVITLDDLRELTQKDNELEKTLRQRYEDLKSQTTEEWKTPELIAAIISDFLNNWAFLTEEEKKECIRIYIKEFFVQASSDRPNQYKKREISISDVEFN

SEQ ID NO: 1160 - protein, 439 aa, synthetic construct
MERVALYCRVSTEEQALHGDSIQTQKDALTEYAKKNNLKIIDYYIDNGFTATSLKRPDLNRLLEDIKENKIDRILFTKIDRWSRGVRNYYKIQDILDKNNADWKTIFENYDTSTANGRLHINIMLSVAENEASVTSERIKAVFKNKIKNKEAISGKVPIGYKIENKKLVIDEKTVGIVHAIFDYFELTHSKRATLNYVIDNLGLNYSYRTVARILGESKYTGIYRDIIDYYPVIISKERFDNVQKISINNVRTTSNTSIYIFTGLLKCSHCNHNLIGYNTVHNKIRYYNYRCRHNYERKLCSNNKCISEKKIEKWLFENIKPELEKYIFNFKIDTKVKTNIPQVDKSSIEKKIKKINDLYINDFITLDEYKSMHEKYKLQLDNIMEKPIELDVSKYNTILNDDFINIYNKFSREEKRTFWRNIIDKIKIDSNKEMKLFF

SEQ ID NO: 1161 - protein, 544 aa, synthetic construct
MAETVELQEKKAVAYSYVRFSTARQELGDSLRRQVAMAEEFCAKYGLDLHPVSYRDLGVSAFKRKNVERGALSAFIDAVKTGKVEKGSYLVIEQFDRLSRAEVDVALKLLLDLVHSGIKLVTLVDEKIWDRESVKDIGNLILAIVFMSRANNESAAKADRLSQAWTQKKKAALESGKIMSRECPRWLTVNADKSAFVVLEDRAESVRRVFAMRINGHGVVSIVNRANREMWPVPGKGDTWHTSLVGRLLSNRALLGEYQPHRSGSEDDKRIPVGELVRDYYPAIIDEQTFLRAQAVRERKGAFPGRRDISYRNWLQGLLKCSCGHSFVRKNKTSSKQPGYARYYCTARNRGVTDCPSMNAREIETAIIHAVSGIAPHFWNGTARLEELNTLLDVQQVDLTAAVSQRDRFAEAIGASKAPIPVLLERLTAAEIEVEKAEKALATTRAEISELQGDSDSVFENIVKAVENVDSLDARAALREDLSRVLVKCVVDVKAGIVNVYIRGEELPLTVPLREDAVIPGAAAGQMTEEEFRGTFGRGPDELE

SEQ ID NO: 1162 - protein, 513 aa, synthetic construct
MKKTRVVFYARVSKDTEEQLHSFEAQKKYFEEFISRNKDMVFIRGYADEGISGVNVKKRKQFQQMIEDAKNSEFDLILTKEVTRFARNTVDTLVNTRLLLKYNVGVLFTTDNIDTRSNDGELRLSLMATLAQEESRKISSRVNWATKRNYENGVAHGTMPYGYKRENGKIVIVEDEAKIVQQIFQLYIDGYGTRRIANTLNEQGYYNATGGEWLPSTIRGMLKNRKYCGDLVQGMSKTIDFLEKKREVVKDESQYYVCVSHHDAIIDKQTFEYVQQLQENRKSINDKNEVKVPFKYSNQNIFSNKIFCGYCNASYRRIKRKNDSIYYKCSTADKKKRVFCPESENIKEEALKDIIKQTAQYFKVNEEDIIRQFEDVLKEIEMDLDEDSIQGIEEKIQSNRSKLEKLVDLYMEGLIDKEIYFHKKEEIEKETYELNQKMNMTSQTQVSVIQKVKNLIETIKDKLNHWRDMSDTLIKELIYKIVVYSKEKLDIYINVASYQKISYENGGCLCYRM

SEQ ID NO: 1163 - protein, 436 aa, synthetic construct
MYKVVYYARVSTEEEGQKNALQNQIGMLEDFINNNIEWELVNSYIDEGKSGTTSKGRKEYNKLYEDLATDKFDIIVIKDLSRLNRNPLDYYKFIDRMVKNEKRLFMFSDNKFYESDDALINGIKAILAQEYSRDISKKVNAGHKQRQKKGTVITNGTTWGYDQQRGSKQLIINEEEAKIVRKIFNWYCDGNGFRKIFKLLEEEGVKNRNGKPFAMTTLKRIIKNEKYKGTLVCNKRHKDFDTKRVKKNSKEEWIIHENAIPAIVTEDIWNKANKILNSKKRKNNADKEEVAGYFNGTHLYSSKIICGQCNRTFWHTKARQKSKWQCKEYKSFGLKKENGHGCWNVQLFTDEIDDIVKDAIYQFWSNKDKAINNVMNILNKVIGNETDNNEEEILKKQQYKLEQKKSRLIDMLADDLITKNEYKNKKKRNRYSIEKY

SEQ ID NO: 1164 - protein, 586 aa, synthetic construct
MAKIWPYIRFSSEEQKHGDSRRRQRELVESFARRHEIVAEGSVIDDSLDLNDLGVSGYRGKNLLTGRFKAFLDAVEAGIVKPGDYLAVEALNRITRLDPMESLPIILNLIQERGIKIAITSGSQIYKKGDDISSLYIAVGELQRGFKESQEKGVRVKEAWNSKKKRAADLGEIATSRVPLWLAVDTTRLDSGTIKRTIREIEERVAVVREIFRLSDINIGAVATARMLTDRGVPTFTRENARKNSNYGDFWQVTYIRKILANRAVLGHYQPMQWLEVDGKRARVSHGAEIKNYFPQIISSELFDRVQLKKDSRKNEGQGNKGLKFSNLFTKMAFCSECGAVAHHVNKGKDPKKGGRYLVCYRAKYGSCAYKSWRYEKVESMILSYLAEADIKSIMRDDNKVDVLINERYKIESECIAVSEMLENFRNDFKALNGRISNIERELAIENEARLVEFKSKLQSLDAEILDAIEQQKADIKQEVKALQEMESVADENTVFEIRSKINARLKLVVDRIVLNFALQVAEVRFKNGVVRYIHEGGVFGNIMPPPTAEQSLEDLRQIEEWSKLSDDEKRSTWADSAFPIVPLKI

SEQ ID NO: 1165 - protein, 603 aa, synthetic construct
MSTPEQLKGDSLRRQLERSRRLAEARGWTLDETFRDLGKSAYRGTHIESGAFGEFLERVRAGKVPTGSVLIVESLDRLSRETVPVALQTFLGIINAGLVLVTLDSEPPREFRADSANVTFDLMLSILELSRAHAESRRKSDLLKPAWENKRRQAREDKKPLTRRLPMWIRIVDGQFEIIPERAEVVREIFELSVAGIGREKLVKLLNGRGIPAPGGGEWGKSGISHILDTPAVIGRFQPSETYYENGRKLRRPVGDIIEGYFPPVIPVDLYNRAHAARQSRSLGYGGRTGWTFSNIFRGLCYCGACGGKMEYFNKGNNLEKGGRYFMCASVKRGSGCQERVTYRYVHFERAFLDNCHHFDFSRLNAAAASDLQHVRERIAELALEQTDLNKRYATILELAETNGLSDRIRTRVAELETALDLNAAEQDKLRVKEATLAHSGQSDTIRQLLEVRGRMETATGEDLYRIRAQLSAMIREFTVGIVFWNGIATVAVGNSGMATPFMALYMFNKAGKLLIRTGLEFGPSTDQHAVPVGDIGTGTPEELQERLRAVDATLKAVSALKARMEPTIPEAERETGMERFKARWGDMDPLPASASLVLEAPG

SEQ ID NO: 1166 - protein, 572 aa, synthetic construct
MRNPEQRTGAMNYHSAFNDGPRRRLTRDDLLGSVSISYLRFSSSGQDPKRGGSTIDRQVEVRDDLVDYFQLKLDRTLEDRALSASKGHHRKRGNLAVLLEASRRGDFLHTRTVLIIEAMDRLFREGIIDVMPILSEMIKMGLVIVTGDRTIWCEASINGSENHKLIAEINAAKLYAERLAEFARGAHKKRRSRIVAVAEDQSAAIPELNGRSPGWLIKRDKIGADGLWHDLHPEHSATLRCIFEMCAAGDPVKQIAATFNREGVPTMPWTSRVEGEWRAARVGAILRDRKTLGFYRPMQWQDGKRVYVGPEVKAYPQAIDAGLWLAAKNVLDGRTMLIGRKGVDVPMLFSRHAFCRTCGAAMRCETGGRPKQGVKPRNLVCARYLESRTCTDGQRYDLNHFEVPILYSIIELTGLVPKTITDEGRLVGDLAALQVEIERQKETLRDLAPSIRPSTAFLLDEATDRLEAMQKRANELELEIEAATAGNSSLKDTFEFLRSLVGPASRGDVEARERLRSLLIKIPYRITGTPTGGIAVEAGGQSRDALPEAMERDAIAMADEHHHGDADADELP

SEQ ID NO: 1167 - protein, 539 aa, synthetic construct
MKTIVIYARKSLFTGKGDSIGAQIDTCKRFIDYKFAQEEYELKIFTDEGWSGKTTDRPEFNKMLKLIKQKKIQYIISYKLDRLGRTARDLHNFLYDIDKLNIIYLSATEPYDTTTSAGRFMISILAAMAQMERERLAERVKGGMMQLAKKGRWLGGQTPLGFDSIKEVYIDNLGKERQMMKLTANKKEIKIVKLLYDKYLELISMSQVKKWCIENSIKGKNGGEISTNTLKQILSSPIYVKSSSKVVDYLENQGINVFGEPNGNGMLTFNKTKEIRLPRNKSEWIAAVSKHKGIIDDIKWLQVQSQLELQSEKQIKSSGRKGTSDSALLSGIIKCAKCGSNMILKTGHKSKKNSNITYSYYVCNAKIDSYGHKCSNKNIRTDEADLAAISQMKLYNKKLLVKNLLVASKEINKDAELDKIVMLKDNIAEKEKGIVNLIKKLSLIDDESISNAILNKVSSLNMEIKKLKTSLNASEIKNNEETTIKVNIDSYIQSLKNFNENIDIASINDKKSLLASVLESVVWDGDSCELKINLIGSEK

SEQ ID NO: 1168 - protein, 600 aa, synthetic construct
MSYAKEQVNAYIYSRVSKDVQVHGDGIRRQIEGAIRFVEKINQDNIQKGIPTYKIADEFITDKGLSAYKGFNTAANGGLGAFLEAARKGEIKRGSLLVVEAVDRISRMPADESRKTFSLFKQYGIDVAIVKFGIIIKHSESTTLENDLLITAAIHLAYMESQQKSNRINDYFDKKRLREKEGGEKRTSICPLWMKLSEDKKSFELIPDRARVMSRIIDMKLNGIGCHRIASTLNKEGVPYFNGKTWSTTIVTKYCKMIQLYGAFQPVKHVRTDSGTQKKPWGDVLQNYYPAVIDEQTFLRLKNSFKRTGGRQTGAYSNLFSGLLCCPECGSGMSYFKPNRGKQKIRCRKQIDKQGCFQRALDYEEIENRLVKALAGLDYAKINNNSFASLSEELSSLEANIAELRENIEAVSAQLMENSNPRLYDILIEKLTKLDDEICIEQDKFNELSTLQSNYDASIINSLQLDSNEDRARYNHFVKQFVKYIICTDKKQGGPLRVVFKADTVGELPFNFDDEKNDKAVSEVFTANRSISDTETVRLINLDKSSGMYLSTLKDITDVKQPNDLSDSRELIRYMHAVRMAVRRNPNKWKGIAAQAKLRY

SEQ ID NO: 1169 - protein, 516 aa, synthetic construct
MSNNKALAFLYIRFSTKKQEQGDSIRRQIDAAEAWCKEKDIELSAQTFEDLGVSAFKEGGKRPALEDMLFAIEQGRIPRNSYLLLEDHDRLSRRGWLHTQTLVHKVVKLGVKIVMLRSRTVYDQSNINNISDNIMLMFSADRAFQESERKSQLIKASRNNARKNREVTGKLPAWIARNGDEFIFNDKLTTIQELIGCKLSGKSHQATAKHLNSLGMTTGSGSVWSASGVRAIIQNHALYGAKAYFDTGADGRMNAKPIEIVPDIFPQLISFQQYQSLNVKKASGRTSKRGAFTQLLKCGRCGSAMTTRSSNYKGQPRTYKMCVRATEGSCSQVERVREPERYLNDVLRKLTYQISKGAYVSRTGEYEKQLETLNETKDKLISLGLTDALTDVYVDMNRVRELIEDSKIADQANIEPDVDFAYVCDIENIEERNTELRKLLSKIVFYCISKRGQTSQWKVVIHQVNGFTISFLLDQQYGFGNTNVKFVADKQQYIKDTQVDMYAWEDEYVDAILDNV

SEQ ID NO: 1170 - protein, 514 aa, synthetic construct
MKDNKGLAYLYIRFSTKKQEQGDSLRRQIEVAEKWCSENNIELSAQTYEDLGVSAFKEGGKRPALEDLIAAIRMGKIVRGSYLLIEDHDRLSRRGWRHTQELVHQLVLSGVRLVMLKDGKVYDSSNIDNIFDNIMLMLSAERAQEESERKSRLIKASREKARRDKKVTGKLPAWISRDGDGFTFNDKKATIQELINCKLAGKSHQSTAKHLNSLKMTTGNDSAWSASGVRAIIQNHALYGAKAYFDTGKDGRMNKEPIEIISDIFPALITHEQYQVLNTRQQAGRTSKRGAYSRLLKCGACGGAMTTRTSNYKGKPRAYKMCVRATEGSCNQIERIREPEVYLNQALHFLKYESSSTLYVSRTSEYQQRLETLNATVDLLTKNGNVDALARVYTDIKEVSDLIEESKAQDQNNVDVKVDFNLISNIEDVEQRNIELRKVLREIRFYCIEKVGQTSKWKVVIEQINGIKKYLVLDQQYGFGNTVVDYASLLTQGTEDNREPWEIEDSEECESYSY

SEQ ID NO: 1171 - protein, 511 aa, synthetic construct; identical to SEQ ID NO: 775

SEQ ID NO: 1172 - protein, 514 aa, synthetic construct
MKAYLYIRFSSKQQEQGDSVRRQEKAAHEWCKVNEVELSDMTFEDLGVSAFKEGGKRPALADLIEAIEMGKISRGSYVLVENDDRLSRLGWYATQQMIRHMVIDLGVKLVVLSSSTVYDTSNIEDIAQNILLMFNADRAYKESLRKSDMIRAARQKRRDDETLTGKLPFWLDRVDGDIRLNKRADVVRLIVELKKSGKSNQATARFLNDQKIPSASGVQWNASAVRVVFSNHAIYGAKAYFITDSKRKMHLDKIVENKLPPIVTKADFDAVQVVKKNVGNKSTKTPFSNLLKCGACGGGMVQRTSTYKEKKMIYRKCIGSLEGRCEQTKQIREPDVILVEALKDIKYIDSVQQHVSKVGELNKQIDTIKQTEQRLLELGNIDALTNLYTRLTDLESKLIGAKKEDEAQEQKPMDFDYKRVFDIEDTSEQNAMLKRVIESIVIQYLGVVDRKSSSRWRVKVIQRNGHHQSFVINQTHGFGNWKIVQETNTEKFKEELEKLTSGIDELDDWQDTEI

SEQ ID NO: 1173 - protein, 512 aa, synthetic construct
MKAYLYIRFSSKQQEQGDSVRRQEEAAQKWCKTHDVELSDMTFEDLGVSAFKEGGKRPALADLIEAIELGKIARDSYVLVENDDRLSRRGWYATQQMIRHMVLDLGVKLVVLSSNTIYDQTNIEDIAQNILLMFNADRAHKESLRKSEMIRAARQTRRDDETLTGKLPFWLTRVNDQILLDPIKADTVRMIVDLKKSGKSNQATARFLNDQNIKSATGGKWNASAIRMVCSNHAIYGAKAYFITDSSRKMTLDKVVEDKLPAIVTKADFDAVQTTQKHRGRRSTKTPFSLLLKCGKCGGGMVQRTSMYKEKKMIYRRCIASLEGRCDQNRLIREPDLILSTALKDMQYIDSVEQHVSKASGIQTQIDTLKQTQDKLIELGQVDALTNLYTRLAQLENQLVHAKVEDEANEQKPIDFNFKNVFDLEDAGEQNAMLKRVLESIEVHYLGVVDKKTSSKWRIKVNQRNKHHQSFVINQYHGFGNWEIVQVTDTEKFKKELDALTDDIDDCLDFDE

SEQ ID NO: 1174 - protein, 508 aa, synthetic construct; identical to SEQ ID NO: 834

SEQ ID NO: 1175 - protein, 528 aa, synthetic construct
MYTPQSLSEHYSQITTPQTEQPLAILYSRFSSRNQVGNDSINRQLEGAQKFCEYHNLKLSEANYSDLGISAYKDNVREGLELLLNAVRDGTIPANSWILCHTTCRLSRKGFQHVLKLVSELVATGCKFCTINDNQVYDSTNINKLSSALPLIISADLAFSESEKKSLMIKHAKEQTRKNRKIVGKQPYWITLQDGKPVLNDFSTIVKTIIDLRLKGYSAQRIAKQLNADGHLSPTGKSWGAAAIRKTIDNHVLYGAKEYSEMKDGKLVPVEIVEDLYPALCSKSIWLQIKYEKGTKEVGKRSKSSPFSKLLRCACCGSAMTTRSTYQKGVKYDYRVCIRSTEGSCDQKSRFRDLDNIILGELKHLKYEVKTHATVEVDSIKVFQDKLTLLNQTKELLQSNPTALAAIYADIAKTEQELHEAKRTKELLESQPNEVNFQAIVDVEDQSQRNVLLRRIIESIEVKRIDKEKLVSQVRVVVRFKNSHTQTFVVCYRYRGYDIKWLTDTEKYKEQLNAFVNDAVKQLEEWEK

SEQ ID NO: 1176 - protein, 530 aa, synthetic construct
MRQAYSYVRLSSKKQILGYGQERQWEAIQSAALAHNWELSDKTFSDLGVSGWKGVNIDTGALSQFLRCVEDGYIEQGSVLIVENVDRLSRAGVNRAVTLLMQLLDNGISIYTLTDSKLYEPDSPNPLMDLMGWALSAQRAFEESERKSQMILNAKAKAREEARLTGKIITRRCPSWLRVNDDKTAFELLPERVETVQKIFDLYTSGYGTPRIGRLLTEEGRKPLNGRAWYARSLSRIIQYRAVLGEYQPTLNGKPEGEPVKEYYPAIVNEDQFNEAQAIMKAGGAGKGRRGEDMRNYFAGLLRCSCGEGMHITSSKVKGKRYYQLRCLQYRISCTNATWNFNKTSTFILFGLRRLPILEVMGADNNKDIKELNDSIRDLTAQLDSSKQQLENTTNAIAELGLSDQLKNKFRELTVLVEDTERQLAEAKSALDKSHGETAIKKQDTEMLSGRFLELIENTKEVDDRIKLNQVLRRYLSKIVLDADKEKDNRFIEIYRKDGELLVTAKLDHKLDGGLFDSSEASEAIELKRA

SEQ ID NO: 1177 - protein, 530 aa, synthetic construct
MRQAYSYVRLSSKKQILGYGQERQWEAIQSAALAHNWELSDKTFSDLGVSGWKGVNIDTGALSQFLRCVEDGYIEQGSVLIVENVDRLSRAGVNRAVTLLMQLLDNGISIYTLTDSKLYEPESPNPLMDLMGWALSAQRAFEESERKSQMILNAKAKAREEARLTGKIITRRCPSWLRVNDDKTAFELLPERVETVQKIFDLYTSGYGTPRIGRLLTEEGRKPLNGRAWYARSLSRIIQYRAVLGEYQPTLNGKPEGEPVKEYYPAIISEDQFNEAQAIMKAGGAGKGRRGEDMRNYFAGLLRCSCGEGMHITSSRVKGKRYYQLRCLQYRISCTNATWNFNKASTYILFGLRRLPILEVMGTDNNKDIKELNNSIRDLTAQLDSSKQQLENTTNAIAELGLSDQLKNKFRELTVLVEDTERQLAEAKSSLDKSHGETAIKKQDTEMLTGRFLELIENTKDVDDRIKLNQVLRRYLSKIVLDADKEKDNRFIEIYRKDGELLVTAKLDHKLNGGTFESSEASEAVELKRA

SEQ ID NO: 1178 - protein, 547 aa, synthetic construct
MRTAYSYVRLSSKKQIQGYGQERQWEAIQAAALAHGWSLSEKTFSDLGVSGWKGANIETGALSQFLQCVEDGYIEKGSVLIVENVDRLSRAGVQRAVSLLMQLLASGISIYTFTDSKLYEPDSHNPLMDLMAWALSAQRAFEESERKSQMILNAKAKAREKARLTGEIITRRCPSWLRVNQDKTEFELIPERVETVRKIFDLYVNGYGTPRIGRLLTEEGRKPLTGRAWYPRSISRILQYRAVLGEYQPTLNGKPEGEAIKNYYPAIIDEDQFNEVQAVLKEGGAGKGRRGKEMRNYFAGLLRCSCGEGMHIVSSCVKGKRYYQLRCLQYRISCFDSPWNFYRLSSFVLFALRRLPILEVMGSQDNNNIKELNAKERELTFLLEDTRRQLDNTINAIAALGLNDQLQSKFRELKTSVTNIEKQLSNVKTELETSQGKLVIQKQDSEMLTGRFLELIDSTKDIDGRIKLNQVLRRYLSKIEMHADKKEEYRYIKIYRKDGDELVSIQCDHSLKGALFESKDDLETFELLPANDAKRNEISNTLLCTPK

SEQ ID NO: 1179 - protein, 547 aa, synthetic construct; identical to SEQ ID NO: 797

SEQ ID NO: 1180 - protein, 575 aa, synthetic construct
MTKIAYSYTRLSTEKQIKGHGFTRQREAIEKVCCQHGWQLSDQTFNDLGVSAWKGANATTGALSQFIDLAKKGAIRPNSVLIVESVDRLSRQQVDKSLRLMLELLEVGVSIFTLSDSKLYTTNSDSVMLDLMMWLMTAQRAHEESEIKSLRVRAAKKKNKELIRKGIIVTRKCPEWLTVSDDKSCFLVNNERAEIVRKIFTWYSQGFSTKPIALKLNELGIPYWGKSSTWSYRHIRSLLKHRGVIGEIQLLKRIDGRDVADGDPVEDYYPAIIDRGLWATCQQIKSSKTTAKGRVVERGMANLFRGLLKCECGSGLAINSSTVKGRTYRFLRCSQLKTTGCQAKNWHYEKTERILLIALRHSLSSFSEEDHAVSLRECQHYLARISEELKEKERQAENAINYLLDKPSKLLEARLQTLEDDIARLKAIQEQAEHRLEAVHYEKSTALDKVEELQRVLEDIANDDDSRHKANGLLRRLIDTITLGSISNPRSKEFMEVSGNDYHGLIIIKRRDGLELRIEVLKDYGLSISWEGDDFTVIECSPTQQLNSQHEHQKFINVGEQTVDLWDDEGWVASS

SEQ ID NO: 1181 - protein, 575 aa, synthetic construct; identical to SEQ ID NO: 153

SEQ ID NO: 1182 - protein, 575 aa, synthetic construct
MTKMAYSYTRLSTEKQINGHGFTRQREAIEKVCCQYGWQLSDQTFNDLGVSAWKGANATTGALSQFIDLAKKGAIRPNSVLIVESVDRLSRQQVDKSLRLMLELLEVGVSIFTLSDSKLYTTNSDSVMLDLMMWLMTAQRAHEESEIKSLRVRAAKKKNKELIRKGIIVTRKCPEWLTVSDDKSCFLVNNERAEIVRKIFTWYSQGFSTKPIALKLNELGIPYWGKSSTWSYRHIRSLLKHRGVIGEIQLLKRIDGRDVSDGDPVEDYYPAIIDRGLWATCQQIKSSKTTAKGRIVERGMANLFRGLLKCECGSGLAINSSTVKGRTYRFLRCSQLKTTGCQAKNWHYEKTERILLIALRHSLSSFCEEDHAVSLRESQHYLARINEELQEKERQAENAINYLLDKPSRLLEARLQTLEDDIARLKAIQEQAEHRLEAVHYEKSTALDKVEELQRVLEDIANDDDSRHKANGLLRRLIDTVTLGSISNPRSKEFMELSGNEYHGLIVIKRRDGLEVRVEVLKNYELSISWEGDEFTVIECPPTQQSKSQHAPQKFINVGGQTVDLWNDEGWVAST

SEQ ID NO: 1183 - protein, 575 aa, synthetic construct
MTKIAYSYTRLSTEKQIKGHGFTRQREAIEKVCCQHGWQLSDQTFNDLGVSAWKGANVTTGALSHFIELTKKGAIKPDSVLIVESVDRLSRQQVDKSLRLMLELLDVGISIFTLSDSKLYTTNSDNVMLDLMMWLMTAQRAHEESEMKSLRIRAAKRKNKELIRQGVIVSRKCPEWLSVSDDKSCFIVNEERAEIVRKVFIWYSQGFSTKPIALKLNELGVPYWGKSSTWSYRHIRSLLKHRAVIGDIQPLIRVNGKDVPDGDAVSDYYPAIVDKGLWATCQQIKSSKTTARGRTVEIGMANLFRGLLKCECGSGLAINSSTVKGRTYRFLRCSQLKTTGCQAKNWHYEKTERILLIALRHSLSSFSEEDHAVALRESQHYLARINEELKEKERQAENAINYLLDKPSRLLEARLQTLEDDIARLKAIQEQAEHRVEAVHYEKSTALDKVEELQRVLEDIANDDDSRHKANGLLRRLIDTVTLGSISNPRSKEFMELSGNDYHGLIVIKRRDGLEVRVEVLKNYELSISWEGDEFTVIECSPTQQPNSQHEHQKFINVGEQTVDLWDDEGWVASS

SEQ ID NO: 1184 - DNA, 110 bp, synthetic construct
  source 1..110: mol_type = other DNA
acttaatataagggagattacttttaaattttaatagtagtagtgttacagggtacgtagtgcttgtaacactatttttatgtataaaaaaagaccacgctcataagaac

SEQ ID NO: 1185 - DNA, 112 bp, synthetic construct
  source 1..112: mol_type = other DNA
tagtgacgtctgtccgcgcagtgatcgagggagtgtgtgctttgccgactggcaaggtcaagccggtctgctaggcacagagagccggtacagtcctccccatgcaacccaa

SEQ ID NO: 1186 - DNA, 118 bp, synthetic construct
  source 1..118: mol_type = other DNA
cgtaaaatcaggcgatgcgccggcacatcgcaaatgtattttgactctcgttcgggttgccgagcgtgtccgaaaatatattatcagacaactcggtcaggggagcgcgtaaacgaaa

SEQ ID NO: 1187 - DNA, 109 bp, synthetic construct
  source 1..109: mol_type = other DNA
gggtgtagatgactgccttcacctgcatagttaaaacggtagcagtgaagctacgatctgtcatagcgtccgagctcactgttttaggctctaaccggtgcgggacgtg

SEQ ID NO: 1188 - DNA, 114 bp, synthetic construct
  source 1..114: mol_type = other DNA
gcattgcgtggtgggctggccatatcctaattgttgcacggttgcggaatgtggtggaattccgcaccggattaacaactgccaaaaaatagaaacccgcagctcacggcatat

SEQ ID NO: 1189 - DNA, 117 bp, synthetic construct
  source 1..117: mol_type = other DNA
cgaaatggttggcgttgaggtcaatgattaatgtgtatagggttaacatttaaatcagtacaatcgtagacgctctacactattttctgtgtataaaaatatcgagaataaacgctt

SEQ ID NO: 1190 - DNA, 105 bp, synthetic construct
  source 1..105: mol_type = other DNA
acggcgcacgtcgttccggtctgggagcctatgcacaacgagggataacggacgttctcccatgctgcgcatagggcaggcgtgcgtgcggttgcgcgtcgtagg

SEQ ID NO: 1191 - DNA, 111 bp, synthetic construct
  source 1..111: mol_type = other DNA
catatagttaatgtgtggtttgtttttttgtacggaagtgtctaaaaagcgtcgcaatttgcgggggttccgtacataataatagtcattcgggtacatccatttagtgga

SEQ ID NO: 1192 - DNA, 114 bp, synthetic construct
  source 1..114: mol_type = other DNA
taatgaacatagcacaacaaaaccaaaaaacagattttacaaggttttcccgtttagtgttagcgaaatactaaaacctgataaaaaccctctccagttgttttttcttgcccc

SEQ ID NO: 1193 - DNA, 112 bp, synthetic construct
  source 1..112: mol_type = other DNA
atggcgacatataagcgttcgtgctttgtcgtcaccttgttggtgtaattaggttgacgccaacagggtgataacacaagaaggactttttatttcttctattatatataga

SEQ ID NO: 1194 - DNA, 115 bp, synthetic construct
  source 1..115: mol_type = other DNA
tgattacgatcagtgccctgggaggcgattccggcatggcttatatccaacaccaccgagagcgctgttgtcgagcgtgtaagccaggacgaggacgagcacgcccacgggcacg

SEQ ID NO: 1195 - DNA, 111 bp, synthetic construct
  source 1..111: mol_type = other DNA
aagagtgttctaaaatagaagaaaataaaaacatacacataaagacgcacgtagatacgtgagttcctacccacttgttttttactctatcttctcttgtttccaatttct

SEQ ID NO: 1196 - DNA, 117 bp, synthetic construct
  source 1..117: mol_type = other DNA
cacattccaagatgtctcaaaatcagtctcacaatccccgtataggtatagtatccctcgggtgcccaaagtatattgaaaatataccaaggttgaatacctcgtcagctaggctag

SEQ ID NO: 1197 - DNA, 110 bp, synthetic construct
  source 1..110: mol_type = other DNA
cacccgtcctagtactcgcatatggcgagtctacaaccgttcccatacgacaagtcgtagtacaactattgtagatgggtgtttagggtacgaaaaaagcccccaggcca

SEQ ID NO: 1198 - DNA, 116 bp, synthetic construct
  source 1..116: mol_type = other DNA
cctggagaagccgattccatgtcatgtacggtagcttgttgtgtacaggttgatgttccacgagccggacagcaacctccacaaaacctgaacagcccccggcggtggtgcgaaca

SEQ ID NO: 1199 - DNA, 119 bp, synthetic construct
  source 1..119: mol_type = other DNA
attcattacaggtagaacttgttgactaataattagtgtagttttacctgtgctgcacatccagaccagttaaaactccattaaaacacgtgattattttcacacaaaaaaaacctcta

SEQ ID NO: 1200 - DNA, 112 bp, synthetic construct
  source 1..112: mol_type = other DNA
tcttttatgtcagcagttcttttcatcctgtttcatcttgtacgcttcgtttcgccgaagcgtacaagatggaaatcataaaccttcaaatgcgccattcgatcttgatgga

SEQ ID NO: 1201 - DNA, 113 bp, synthetic construct
  source 1..113: mol_type = other DNA
cttgaagattatgtgaggcgaacatctaaagaaaaccgaatagactttattcaagggtcattgtattgtagctattcggcattgtagcattagccataacggttataagctta

SEQ ID NO: 1202 - DNA, 107 bp, synthetic construct
  source 1..107: mol_type = other DNA
ggttcattgaacaggagaacaatgatatgagtgttaaggcaagaatactagtgcttttacatagctaaacacgtacattcaactacctgttaataacaggacaatat

SEQ ID NO: 1203 - DNA, 104 bp, synthetic construct
  source 1..104: mol_type = other DNA
tactatataaactaaataataaatattcttgttcactttgaaactatattgtgatattgttgcaaagaagcaaaattgatactctcttatactttactggggtg

SEQ ID NO: 1204 - DNA, 117 bp, synthetic construct
  source 1..117: mol_type = other DNA
atcaattgaagaagatgtaagatgaacatctaaagaaaaccgaatagacttaaatcaagggtcattgtattgtagctattcggcattgtagcattagccataacgtttataagttca

SEQ ID NO: 1205 - DNA, 104 bp, synthetic construct
  source 1..104: mol_type = other DNA
aacaggtgataggattcggatgttctcatagtgtatttagggaattaatatcagtataatgggtccctaaacacatcattttaggtattgaatatgagacgggc

SEQ ID NO: 1206 - DNA, 105 bp, synthetic construct
  source 1..105: mol_type = other DNA
aaaatatacttgcgattagtcgttatttttcatagacaagtaaatcaatcatgcacatggtagcatgagtgttctatgaaaaaagagggtaggagcgatcagcta

SEQ ID NO: 1207 - DNA, 107 bp, synthetic construct
  source 1..107: mol_type = other DNA
taacagtaaatttccttatataatttatgtgtactaacttatatattccggaaggataatataggttagtacacgtataaaaatatcttttatattgacacaattta

SEQ ID NO: 1208 - DNA, 111 bp, synthetic construct
  source 1..111: mol_type = other DNA
ccgttgaagaactacgctaaaagtattaaatcaaaatgttcccatagtatacgaaaggacgcataccataatcaatgggaacatttgaattttcgtaaaaaaaagaggcca

SEQ ID NO: 1209 - DNA, 113 bp, synthetic construct
  source 1..113: mol_type = other DNA
agaaccttgaaaaactatggcttatgctacctcgccgaatagctcaaatacaatgacccttgaatataggctattcgggttttgaaggtatctggtttttattcacatcacaa

SEQ ID NO: 1210 - DNA, 105 bp, synthetic construct
  source 1..105: mol_type = other DNA
taagtgatttcagtctgagagggaaagtgtatcaatagaaaggtctcttcaggattacacctttcttatgatacacttcttcaatccttcataactcatcataaa

SEQ ID NO: 1211 - DNA, 108 bp, synthetic construct
  source 1..108: mol_type = other DNA
tgaattattgatgtaagaggctttttgttctttagtgttcttaacttccttaatgtctgctattgtagtgctatctacactacggttaagcgacctctctaatgaaaa

SEQ ID NO: 1212 - DNA, 104 bp, synthetic construct
  source 1..104: mol_type = other DNA
gtaacgctcttcgagaaagcagattctcatatccatcttgagtcttctttctcgcaagacaacacgaaatagacacagtctcttccctagctgtacactgagcc

SEQ ID NO: 1213 - DNA, 102 bp, synthetic construct
  source 1..102: mol_type = other DNA
gttcaaccgtcctagaagaccttgatgtgtgagattcacccctaccattcgagactggcaggtggtattctcacacttcctaagatctcagcaggaagcccg

SEQ ID NO: 1214 - DNA, 109 bp, synthetic construct
  source 1..109: mol_type = other DNA
caccacctattaatttaggagtgtggttgtttttgttggaagtgtgtatcaggtaacagcatagttattccgaacttccaattaataaaactctatacccgtaatcttc

SEQ ID NO: 1215 - DNA, 106 bp, synthetic construct
  source 1..106: mol_type = other DNA
cctattaatttatgagtgtggttggtttttaatgaatgttttgtaactattgcgttctttctagttacataacactcattaatatttgaaatgtatttcattgatt

SEQ ID NO: 1216 - DNA, 110 bp, synthetic construct
  source 1..110: mol_type = other DNA
gtggtgcttgttacataactcttatgtatattttatatgggggttatagggggtacgtagcaccggtaccccccatagttgcaacgaacatttgtgtaccaggtgtaata

SEQ ID NO: 1217 - DNA, 112 bp, synthetic construct
  source 1..112: mol_type = other DNA
ttccgacgcagtttccgacgagtacgaggacgaggacagacgtgcctaccggcaaggtcaagtggttcaacagcgagaagggcttcggctttctctcccgcgacgacggcgg

SEQ ID NO: 1218 - DNA, 118 bp, synthetic construct
  source 1..118: mol_type = other DNA
gcgtcagatcgacgatcgtcggcagcagcgcgagatagaacagcatgatcttcgggttgccgagcgtgaccagcgtgccggcgacgaacatccgtatcggcgattgcccgcgcggcag

SEQ ID NO: 1219 - DNA, 109 bp, synthetic construct
  source 1..109: mol_type = other DNA
cggctgacgctggcgctgtcgccggccacgctgccgaagatggggtcggtctacgatctcgcgctggcgctggccgtgctgtcggcggagaagaaaaccgagtggcccc

SEQ ID NO: 1220 - DNA, 114 bp, synthetic construct
  source 1..114: mol_type = other DNA
ccggaaaggtccggatggaaggcaaggaatacgtcatggttgacggtgacgtggtggaattccggtttaacgtctaggcggaagcgctactaatgccgcgccgccgcgaacttc

SEQ ID NO: 1221 - DNA, 117 bp, synthetic construct
  source 1..117: mol_type = other DNA
gctggtcgaggagttaatgaagatctccaacatgttcggctacggtgaggtaaatcagtacaatcgtcactcgaccctaatgtctgcctataaaaacatcaaagatgaacatttccg

SEQ ID NO: 1222 - DNA, 105 bp, synthetic construct
  source 1..105: mol_type = other DNA
tcgtcgacgcctcgctgcccggcggcgagcggctccacgtggtgatccccgacgtcacgcgcaccgcgtgggcggtcaacatccgcaagcacgtggtccgtgcgt

SEQ ID NO: 1223 - DNA, 111 bp, synthetic construct
  source 1..111: mol_type = other DNA
tcaaacgctaggtcttctgcttctagccattttttggcttttttaattgtgtcgcaatttgggatgccgaacatggtaatcgtcatattatttccttttctttttattttt

SEQ ID NO: 1224 - DNA, 114 bp, synthetic construct
  source 1..114: mol_type = other DNA
agaatggcgcccattttctttgaatcacagaatagcaaattatgagcgtacgtttagtgttagccaaagggcgcgagaaatctctcctgcgccgccatccctgggtcttttccg

SEQ ID NO: 1225 - DNA, 112 bp, synthetic construct
  source 1..112: mol_type = other DNA
cttgaccgaatgggacgaagtagatgttttttgtggccattaggcgcatgaggttgacgccattaagccctaaagcatcattcgtcgaaacggccaatacgacaggcttgcc

SEQ ID NO: 1226 - DNA, 115 bp, synthetic construct
  source 1..115: mol_type = other DNA
gtgacccgttccgccgtcgagaacgccacctccgtggcgcgcatggtgctcaccaccgagagcgccgtggtcgacaagccggccgaggaagagcccgcgaacggccaccacggcc

SEQ ID NO: 1227 - DNA, 111 bp, synthetic construct
  source 1..111: mol_type = other DNA
tagcacctatcttattggcattgattggtgcgttaaatactccacctgtagtagatacgtgtgtcccaataaatttatttatctttctattttccattaaataattctcct

SEQ ID NO: 1228 - DNA, 117 bp, synthetic construct
  source 1..117: mol_type = other DNA
tgccgccacgccccacattcaagatgtcccaatcccccaaagtagggttcgtatccctcgggtgcccgaaagcgctggtcgactccgaacaaatcatcacccagctgcgcgccgagg

SEQ ID NO: 1229 - DNA, 110 bp, synthetic construct
  source 1..110: mol_type = other DNA
ggctggccggtacgtcccggccccctgcggaacatctgcacggcgcacgccaagtcgtaggtgatcacgccgtcgagcgccagcgctgccaccgtcttggtgcccatacc

SEQ ID NO: 1230 - DNA, 116 bp, synthetic construct
  source 1..116: mol_type = other DNA
gctcggcggacggcgacccgtacctggcaagctgaacgccgtgttccgagtgatgttccacgagccccgcatcccacccaatacgggaaacgcgatccgcatggtcgccgggacgg

SEQ ID NO: 1231 - DNA, 119 bp, synthetic construct
  source 1..119: mol_type = other DNA
gttttttcatataaagttacatcagcacctgcctttttagctgttatggctgctgcacatccagaccagccacctccaattattataatcttcatattagtcttctcctttcaaaaaca

SEQ ID NO: 1232 - DNA, 112 bp, synthetic construct
  source 1..112: mol_type = other DNA
acgtagtagacatttttctcgtccaggcggtccttggcgaggcgcaggccttcgccgaagcgctggaagtgtacgatctcgcgcgcacgcaggaacttgatgacgtcgctca

SEQ ID NO: 1233 - DNA, 113 bp, synthetic construct
  source 1..113: mol_type = other DNA
catgaatgcagaccgaaagtaacgtcggccaggggaagcggcgaggtaaatcaagggtcattgaagtcataatcatttcagtagaaaaaccaggtctcgattttaaatgcaaa

SEQ ID NO: 1234 - DNA, 107 bp, synthetic construct
  source 1..107: mol_type = other DNA
ctacggaatagagataacacgaggagtggttagaaatggctaaagttctggtgctttattattccatgtacggacatattgaaacgatggcacgcgcagtcgctgag

SEQ ID NO: 1235 - DNA, 104 bp, synthetic construct
  source 1..104: mol_type = other DNA
caaatttgacggaaatgttttcaaacaacggcttactgccgaactgcatggtgacgttactggaaactaacacaggcgtatcctgaaaagagatatgacaaacc

SEQ ID NO: 1236 - DNA, 117 bp, synthetic construct
  source 1..117: mol_type = other DNA
gcaccatgaatgcagaccgaaagtaacgtcggccaggggaagcggcgaggtaaatcaagggtcattgaagtcataatcatttcagtagaaaaaccaggtctcgattttaaatgcaaa

SEQ ID NO: 1237 - DNA, 104 bp, synthetic construct
  source 1..104: mol_type = other DNA
gcttggcgttaccggtcactccgccctgaatatgtggtccggtattgtcttcagcattacatttttattttcggccatcgcctcaccgttttggggtggactcg

SEQ ID NO: 1238 - DNA, 105 bp, synthetic construct
  source 1..105: mol_type = other DNA
cgacaccaactggcttggcttctgcttggattttacgccatccagccaatatgcaagtgatcgccggtacgatgaacgtagggcgaatcaaggaaatcgctcaag

SEQ ID NO: 1239 - DNA, 107 bp, synthetic construct
  source 1..107: mol_type = other DNA
gtatccttttggtaaaattcatatcctgctgcgatggaataacattaccagaaggatgattatgcgctaaaacgatccttgctgcacaataacgtacagcataatgg

SEQ ID NO: 1240 - DNA, 111 bp, synthetic construct
  source 1..111: mol_type = other DNA
tccgggggcccccactattcatatgaacggctctcaacctgtgctaaaaaacgaaaggacggcatgccatgaatatattcgatcactatcgccagcgctacgaagctgcca

SEQ ID NO: 1241 - DNA, 113 bp, synthetic construct
  source 1..113: mol_type = other DNA
tttgcatttaaaatcggagcatcatttttcaacagaaacgactatgagcgcaatgacccttgatttacctcgccgctttccgtggccaacgctgctgtccgtggctatccacg

SEQ ID NO: 1242 - DNA, 105 bp, synthetic construct
  source 1..105: mol_type = other DNA
cgatcatcgccggactggtggccgcagcgctatggaccgggcggctgtcgaggatcacgcggttgacgttacgctcgtgcagcccgcggttgagctgctgttccg

SEQ ID NO: 1243 - DNA, 108 bp, synthetic construct
  source 1..108: mol_type = other DNA
cgaggatgagttatgaagctggaagaaatcgtagcccttagtgtaaagcataatgtctctgatctacacctgtgcaattccgccgcaccacgctggcggcggcagggc

SEQ ID NO: 1244 - DNA, 104 bp, synthetic construct
  source 1..104: mol_type = other DNA
ccggtttcccttcgcacccgcaccgcggcttcgagaccgtgacctacatgctcgaagggcgtatgcgccacgaagaccacctcggcaatcgcggcctgctcaag

SEQ ID NO: 1245 - DNA, 102 bp, synthetic construct
  source 1..102: mol_type = other DNA
aactgccggagttcgagcgcaaggtcctggaggtcctgcgcgagccgctggaaagcggcgagatcgtcattgcccgggccaacggccgggtacgtttcccgg

SEQ ID NO: 1246 - DNA, 109 bp, synthetic construct
  source 1..109: mol_type = other DNA
tgattgttttaagtgggactttttatattgcaaaaaataaatggcggacgaggtaacaggatacctcatctgccaattaaaatttgttaatttaataattaaataaaaa

SEQ ID NO: 1247 - DNA, 106 bp, synthetic construct
  source 1..106: mol_type = other DNA
aacatgaggttattgttgctaatattaataagttatattggaggaacgtgtgcgttagaagtcgtaccattcatgtccttacgagataaattaactaaacacgtat

SEQ ID NO: 1248 - DNA, 108 bp, synthetic construct
  source 1..108: mol_type = other DNA
tgacagcgccatttgctgggagagagtgatggtgtaacaagcgaattacttgggatcagatcatctgaatgttacactgccaccttttcgacgaaggtgtgtggtttc

SEQ ID NO: 1249 - DNA, 108 bp, synthetic construct
  source 1..108: mol_type = other DNA
aattgccatggaaaaactaaacctgtcggcaagagcctatgatcgaattttaaaagtatcaagaactattgccgatttagcatccgaagaaaatataaaatcggaaca

SEQ ID NO: 1250 - DNA, 102 bp, synthetic construct
  source 1..102: mol_type = other DNA
gtacaaataaaagcatcaagacaccgataattaacaggacaatcaacatctccacaagtgtgaaagcttcaacagattttttacgtaattttttccatagtt

SEQ ID NO: 1251 - DNA, 106 bp, synthetic construct
  source 1..106: mol_type = other DNA
aaaaaggagaagtttatcttcaagatccaataggggttgataaagaaggaaatgaaatttgtttaatagatgttttaagtagtgaaaaagatttagttttagaaaa

SEQ ID NO: 1252 - DNA, 104 bp, synthetic construct
  source 1..104: mol_type = other DNA
taataaagaatgaaaataaatctactattttagttacccatgatatatcagaagctatttctatgtcagataaggtcgcagttttatccaaacgtcctgcatct

SEQ ID NO: 1253 - DNA, 129 bp, synthetic construct
  source 1..129: mol_type = other DNA
aatttgagttttaatttatttttttctttcgcaattctaaatttttgtaacatttgtagttcctccttcattcgaaatcatcgatagttaattctgaaactctcttttcatagatatataaataatagt

SEQ ID NO: 1254 - DNA, 133 bp, synthetic construct
  source 1..133: mol_type = other DNA
cggagggtgattttaaagagtttttcataattaatactttgcactctgttattttttttataatttactatttttttcaaataataactataaatatctttgcgtagacaacctttaaatttcgctcagaacc

SEQ ID NO: 1255 - DNA, 102 bp, synthetic construct
  source 1..102: mol_type = other DNA
taaagggtttcacgcataagtaccaataatgtaacaacctgtactgaatgtgcttccagtacaggttgttacaccgttaggcaaaaaaataaatatccatag

SEQ ID NO: 1256 - DNA, 105 bp, synthetic construct
  source 1..105: mol_type = other DNA
tgattgtcgcaggactatccgactgggggtgtgttttgataccaaccgggctcccgaacggtatcgaaacacacccccacacgaaagtgcggggacaggcttaat

SEQ ID NO: 1257 - DNA, 105 bp, synthetic construct
  source 1..105: mol_type = other DNA
agttgatccaggtggaaaaggcgatcgaagttcattgaggggttctatttttgaacgagttaactgagtttaacccataccattctcagggattaagaggatatt

SEQ ID NO: 1258 - DNA, 102 bp, synthetic construct
  source 1..102: mol_type = other DNA
gaaaaaaatgatgacattattgaaaaaagcgaaggttaaagctttcacacttattgagatgttggttgtcttgctcattatcagtgtgcttctcttgctctt

SEQ ID NO: 1259 - DNA, 105 bp, synthetic construct
  source 1..105: mol_type = other DNA
aaatgctggacgggaggataacagaggctcagtgttacatacgatattgttgggagcaagcttttcgtaagtaacactgagatatagacgccactggctgtggct

SEQ ID NO: 1260 - DNA, 102 bp, synthetic construct
  source 1..102: mol_type = other DNA
caaaatatgtgatggaagatatgaggtttttacaacaggagaatttcgtttgtctttatctcaattcaaaaaatcaagttcttcataaacatactgtgttta

SEQ ID NO: 1261 - DNA, 106 bp, synthetic construct
  source 1..106: mol_type = other DNA
tcgatcaggtcgaccagcgtgctggcttcgagtttgtgcatgaggcgtttcttgtaagtgctgaccgtcttgctgcttagaaacatgccctttgcaatctccttgt

SEQ ID NO: 1262 - DNA, 148 bp, synthetic construct
  source 1..148: mol_type = other DNA
caatgagatatgcgttagttagaacaataggttgtcgggcgcttctgccaattgaaaatccgcgtgtcggtggttcaaatccgcctccgggcaccattaacttgctgaaaatgctaagtttttggaaagctctttgatcccgcttgtg

SEQ ID NO: 1263 - DNA, 128 bp, synthetic construct
  source 1..128: mol_type = other DNA
gcgtcatgctcatcgaacaaatctacagagcctttaagatcatgaaaggcgaagcatatcacaaataaaactaaaaaatagattgtgtataatatattttaaatataaaaaggattgattttatgtta

SEQ ID NO: 1264 - DNA, 103 bp, synthetic construct
  source 1..103: mol_type = other DNA
cgaaatacatgatggaagaaatgcgttttttacaacaagagcattttgtttgtttatatttaaatacaaaaaatcaagttatacataggcaaacgatctttat

SEQ ID NO: 1265 - DNA, 105 bp, synthetic construct
  source 1..105: mol_type = other DNA
gtaatcctcccgtcagaccgttaccctgtgtagtcccttgtaaactgtactttaggtcagtttacaaggaactacacgcagaccgtgaaacgggctgctgacaac

SEQ ID NO: 1266 - DNA, 102 bp, synthetic construct
  source 1..102: mol_type = other DNA
cagttccaatggttctcagaaaatttcaagttaaagcatttactgttttggagagccttattgtattatcagtagtggcatttatgacgttagtattttcaa

SEQ ID NO: 1267 - DNA, 106 bp, synthetic construct
  source 1..106: mol_type = other DNA
atcgcacgctcttcgtggcagggaaagccgcagtgtaacattcagagaaactggtcacaacattttcttttgttacaccacgttgatggctagccacctatgcacc

SEQ ID NO: 1268 - DNA, 110 bp, synthetic construct
  source 1..110: mol_type = other DNA
agtttaatactaaaagaggtatattaattttatttaaaaattgacattaatgactcttaaccaaatgctctgcttgtgaaaaaagctttataaaactttataaataggtt

SEQ ID NO: 1269 - DNA, 102 bp, synthetic construct
  source 1..102: mol_type = other DNA
gctgctcaaaagggcagcatacatcacagtgtcacttagcacatagctgttcacaggtattttatatgttacaccaccagcccattctgctggcaatactag

SEQ ID NO: 1270 - DNA, 105 bp, synthetic construct
  source 1..105: mol_type = other DNA
atttgctggctgagatggtaacaggggatcagtgttacatgtgaaaacgttgggagcaagctctttgtaagtaacactgagaagtacctaacatgagagtaaccc

SEQ ID NO: 1271 - DNA, 110 bp, synthetic construct
  source 1..110: mol_type = other DNA
tactccctggtgtcctcccagcaagcgcactactgggttaggatgttcactgacaccagtacagtatcagaagcataagtggcaggacgaatacccaactgaaatcagta

SEQ ID NO: 1272 - DNA, 113 bp, synthetic construct
  source 1..113: mol_type = other DNA
tgattttacgctggtgctatatcctaaactcccacagataaacagttaatggtaatgaaataacattaactgtttatctgtgtttaatgccttaacttaatctagtaggaggg

SEQ ID NO: 1273 - DNA, 102 bp, synthetic construct
  source 1..102: mol_type = other DNA
ttaaaaagaaaggctttaagtttgtgggcgagacgatttgctacgccttcatgcaagcagtaggcatggtcgatgaccacattgttggctgtcctaaaaagc

SEQ ID NO: 1274 - DNA, 103 bp, synthetic construct
  source 1..103: mol_type = other DNA
gacacactttcgagtgtgtcttttttattacctgaataaaaccaagaactaaagtacctagttttattcaggtaagtgtaaaaaacggctaaatctagccgtt

SEQ ID NO: 1275 - DNA, 105 bp, synthetic construct
  source 1..105: mol_type = other DNA
ttggaatgacaatcaacaataagacagaaataaccattaatacgattagcatttcgattaacgtaaaccccttttcattcttcattgtccttccctcctataaat

SEQ ID NO: 1276 - DNA, 103 bp, synthetic construct
  source 1..103: mol_type = other DNA
cgtacatggctcctagtgtgtacgatgggaaataaccaaaagagccgtctgtccaatggatgtcttgcatacaaccatttttgaagttgccctctgtagatag

SEQ ID NO: 1277 - DNA, 147 bp, synthetic construct
  source 1..147: mol_type = other DNA
tttgcgggacgcttccgacgctgtaggaccgagtggacggcctgaagctcacttctaatccgacggttgcaggttcgagtcctgccgggggcacttctaaaacccttgcaagcaaagggttcctagcgccaacagctgagctgtgca

SEQ ID NO: 1278 - DNA, 106 bp, synthetic construct
  source 1..106: mol_type = other DNA
tagatatttctctttatttaaatagttggtcgtaaattaccacatgctattggggagaagtagtgtaaaaggtacttggtctgtgttattcgccatatatcaaaaa

SEQ ID NO: 1279 - DNA, 106 bp, synthetic construct
  source 1..106: mol_type = other DNA
atctgtccgcccaatcggcggcagaatgtaagctgacggaattcggcttgatcaatatggatgaatttgataaatttactcctcgcaagatggcattgttgaagaa

SEQ ID NO: 1280 - DNA, 131 bp, synthetic construct
  source 1..131: mol_type = other DNA
ctaagatcaatacgatgtatcttgttattacttttgcatccatttgtttgctccttttatccaaaataaaaaacgactaaataagccgtctatttgatatttatattatggtgtgttaatttatatataga

SEQ ID NO: 1281 - DNA, 103 bp, synthetic construct
  source 1..103: mol_type = other DNA
ccatggatttctcagagaactccgggcgcgtttttaatatgcgcaaagggatcccttttgtcaagacgaaaaaacaagattacctgcagaaatgctccgacta

SEQ ID NO: 1282 - DNA, 108 bp, synthetic construct; identical to SEQ ID NO: 1248
  source 1..108: mol_type = other DNA

SEQ ID NO: 1283 - DNA, 108 bp, synthetic construct; identical to SEQ ID NO: 1249
  source 1..108: mol_type = other DNA

SEQ ID NO: 1284 - DNA, 102 bp, synthetic construct; identical to SEQ ID NO: 1250
  source 1..102: mol_type = other DNA

SEQ ID NO: 1285 - DNA, 106 bp, synthetic construct; identical to SEQ ID NO: 1251
  source 1..106: mol_type = other DNA

SEQ ID NO: 1286 - DNA, 104 bp, synthetic construct; identical to SEQ ID NO: 1252
  source 1..104: mol_type = other DNA

SEQ ID NO: 1287 - DNA, 129 bp, synthetic construct; identical to SEQ ID NO: 1253
  source 1..129: mol_type = other DNA

SEQ ID NO: 1288 - DNA, 133 bp, synthetic construct; identical to SEQ ID NO: 1254
  source 1..133: mol_type = other DNA

SEQ ID NO: 1289 - DNA, 102 bp, synthetic construct; identical to SEQ ID NO: 1255
  source 1..102: mol_type = other DNA

SEQ ID NO: 1290 - DNA, 105 bp, synthetic construct; identical to SEQ ID NO: 1256
  source 1..105: mol_type = other DNA

SEQ ID NO: 1291 - DNA, 105 bp, synthetic construct; identical to SEQ ID NO: 1257
  source 1..105: mol_type = other DNA

SEQ ID NO: 1292 - DNA, 102 bp, synthetic construct; identical to SEQ ID NO: 1258
  source 1..102: mol_type = other DNA

SEQ ID NO: 1293 - DNA, 105 bp, synthetic construct; identical to SEQ ID NO: 1259
  source 1..105: mol_type = other DNA

SEQ ID NO: 1294 - DNA, 102 bp, synthetic construct; identical to SEQ ID NO: 1260
  source 1..102: mol_type = other DNA

SEQ ID NO: 1295 - DNA, 106 bp, synthetic construct; identical to SEQ ID NO: 1261
  source 1..106: mol_type = other DNA

SEQ ID NO: 1296 - DNA, 148 bp, synthetic construct; identical to SEQ ID NO: 1262
  source 1..148: mol_type = other DNA

SEQ ID NO: 1297 - DNA, 128 bp, synthetic construct; identical to SEQ ID NO: 1263
  source 1..128: mol_type = other DNA

SEQ ID NO: 1298 - DNA, 103 bp, synthetic construct; identical to SEQ ID NO: 1264
  source 1..103: mol_type = other DNA

SEQ ID NO: 1299 - DNA, 105 bp, synthetic construct; identical to SEQ ID NO: 1265
  source 1..105: mol_type = other DNA

SEQ ID NO: 1300 - DNA, 102 bp, synthetic construct; identical to SEQ ID NO: 1266
  source 1..102: mol_type = other DNA

SEQ ID NO: 1301 - DNA, 106 bp, synthetic construct; identical to SEQ ID NO: 1267
  source 1..106: mol_type = other DNA

SEQ ID NO: 1302 - DNA, 110 bp, synthetic construct; identical to SEQ ID NO: 1268
  source 1..110: mol_type = other DNA

SEQ ID NO: 1303 - DNA, 102 bp, synthetic construct; identical to SEQ ID NO: 1269
  source 1..102: mol_type = other DNA

SEQ ID NO: 1304 - DNA, 105 bp, synthetic construct; identical to SEQ ID NO: 1270
  source 1..105: mol_type = other DNA

SEQ ID NO: 1305 - DNA, 110 bp, synthetic construct; identical to SEQ ID NO: 1271
  source 1..110: mol_type = other DNA

SEQ ID NO: 1306 - DNA, 113 bp, synthetic construct; identical to SEQ ID NO: 1272
  source 1..113: mol_type = other DNA

SEQ ID NO: 1307 - DNA, 102 bp, synthetic construct; identical to SEQ ID NO: 1273
  source 1..102: mol_type = other DNA

SEQ ID NO: 1308 - DNA, 103 bp, synthetic construct; identical to SEQ ID NO: 1274
  source 1..103: mol_type = other DNA

SEQ ID NO: 1309 - DNA, 105 bp, synthetic construct; identical to SEQ ID NO: 1275
  source 1..105: mol_type = other DNA

SEQ ID NO: 1310 - DNA, 103 bp, synthetic construct; identical to SEQ ID NO: 1276
  source 1..103: mol_type = other DNA

SEQ ID NO: 1311 - DNA, 147 bp, synthetic construct; identical to SEQ ID NO: 1277
  source 1..147: mol_type = other DNA

SEQ ID NO: 1312 - DNA, 106 bp, synthetic construct; identical to SEQ ID NO: 1278
  source 1..106: mol_type = other DNA

SEQ ID NO: 1313 - DNA, 106 bp, synthetic construct; identical to SEQ ID NO: 1279
  source 1..106: mol_type = other DNA

SEQ ID NO: 1314 - DNA, 131 bp, synthetic construct; identical to SEQ ID NO: 1280
  source 1..131: mol_type = other DNA

SEQ ID NO: 1315 - DNA, 103 bp, synthetic construct; identical to SEQ ID NO: 1281
  source 1..103: mol_type = other DNA

SEQ ID NO: 1316 - DNA, 104 bp, synthetic construct
  source 1..104: mol_type = other DNA
cttaaccgcttttgaatgtccgtcttagttaatccctaattgaacgctccaaaaggtgacttccaatagggatttattccttttaaaattaacggcataatcgt

SEQ ID NO: 1317 - DNA, 114 bp, synthetic construct
  source 1..114: mol_type = other DNA
cgtttatcgggcggtaatattttaaagtattgcgctacactcggcacccgacacatgtggagtgctgtgtgtcgctcgtatggaagtaatgattaggagccgcatttacctttc

SEQ ID NO: 1318 - DNA, 104 bp, synthetic construct
  source 1..104: mol_type = other DNA
tgtcagcgttaatgataagttggtttctatacttccttatcactgtaaacatcaaggtttgcggtgataaggaagtaatttcagattaggcggtatagccccat

SEQ ID NO: 1319 - DNA, 106 bp, synthetic construct
  source 1..106: mol_type = other DNA
ttaaaaaagtctgctaataaaggcaataattctatatctgggtaagaatttccactctcccacttagatactgctggtgttgacacacctataaactttgctaatt

SEQ ID NO: 1320 - DNA, 122 bp, synthetic construct
  source 1..122: mol_type = other DNA
tctttgttaaattacgcaaaatttcattcccaacttcatatccaaataaatcatttatatatttaaatttattgacatccaattgtactaagtaaaaattatcttgataataattctttaaa

SEQ ID NO: 1321 - DNA, 102 bp, synthetic construct
  source 1..102: mol_type = other DNA
aagccgcatggttacggcattttccgtgttgtgcatatattgacggagcagtagagccgtgtatttatgcacaacattagattttcctttgttttgagtagg

SEQ ID NO: 1322 - DNA, 102 bp, synthetic construct
  source 1..102: mol_type = other DNA
agaaactttactcaaatgtatttctgttgccagtgcaaatgatgcctgtgttgctatggctgaatatatttcaggaaatgaagaggaatttgtccgtcagat

SEQ ID NO: 1323 - DNA, 112 bp, synthetic construct
  source 1..112: mol_type = other DNA
tgataataaaatataacagttattaaatcccttggaatatatgaaatctcaattccagtttgccgaaatatctggctaactttcccaattttacagacattccagcccattc

SEQ ID NO: 1324 - DNA, 104 bp, synthetic construct; identical to SEQ ID NO: 1316
  source 1..104: mol_type = other DNA

SEQ ID NO: 1325 - DNA, 114 bp, synthetic construct; identical to SEQ ID NO: 1317
  source 1..114: mol_type = other DNA

SEQ ID NO: 1326 - DNA, 104 bp, synthetic construct; identical to SEQ ID NO: 1318
  source 1..104: mol_type = other DNA

SEQ ID NO: 1327 - DNA, 106 bp, synthetic construct; identical to SEQ ID NO: 1319
  source 1..106: mol_type = other DNA

SEQ ID NO: 1328 - DNA, 122 bp, synthetic construct; identical to SEQ ID NO: 1320
  source 1..122: mol_type = other DNA

SEQ ID NO: 1329 - DNA, 102 bp, synthetic construct; identical to SEQ ID NO: 1321
  source 1..102: mol_type = other DNA

SEQ ID NO: 1330 - DNA, 102 bp, synthetic construct; identical to SEQ ID NO: 1322
  source 1..102: mol_type = other DNA

SEQ ID NO: 1331 - DNA, 112 bp, synthetic construct; identical to SEQ ID NO: 1323
  source 1..112: mol_type = other DNA

SEQ ID NO: 1332 - DNA, 102 bp, synthetic construct
  source 1..102: mol_type = other DNA
agctggcgcttaatcgtgggcttatcgcgcgcggcgttaatcgcgtgatgctcgacagccgcccggtgcatgccgccaggccgaacagcccggcggttatcg

SEQ ID NO: 1333 - DNA, 109 bp, synthetic construct
  source 1..109: mol_type = other DNA
cgatgggatttgaacccacacgagcttacgctcacaagaccctcaatcttgcatgtctgccgttccatcacgtctgcaagaaacaacactttaatcatagcgagtaacg

SEQ ID NO: 1334 - DNA, 113 bp, synthetic construct
  source 1..113: mol_type = other DNA
agaaggcctcgcaaccttcacctccgccctaaaagaccctcatctcgggcttgccatagctgtcgccatagcaatccataatattccggaaggaattgctacttctgtaccga

SEQ ID NO: 1335 - DNA, 104 bp, synthetic construct
  source 1..104: mol_type = other DNA
agggattgaaatcatcgaggggctgcgaggccatacatccgggtatgctgtaccgacatttgttgtagatgcaccagggggtggcgggaaaatcacactgcaac

SEQ ID NO: 1336 - DNA, 108 bp, synthetic construct
  source 1..108: mol_type = other DNA
gtaaacgtggtggcgacctaggtgagtttcgccgcggtcaaatggtgccacagtttgataaagtttgtttttcaggtgaggttctaacgccacacctagtcaaaacca

SEQ ID NO: 1337 - DNA, 104 bp, synthetic construct
  source 1..104: mol_type = other DNA
gaaggaactggaacagaaaatttataaaataaacatataaaaaagaggctttagcctcttttttatatgtttaaattaaatccattcaccatattttttaatat

SEQ ID NO: 1338 - DNA, 105 bp, synthetic construct
  source 1..105: mol_type = other DNA
atgaggatgagtttataaaaactggaaaaagaaaatcttttatcatgcaaacatttggatgtcaaatgaatgagcatgactcagagatgttaatttcaatgttag

SEQ ID NO: 1339 - DNA, 102 bp, synthetic construct
  source 1..102: mol_type = other DNA
ccagctcggacggaaccagcggggagagtttgtacgcccacttgtagagatccatgttggcgtgcaggcagccgggctgctccaggtcgtgctgcctgtccc

SEQ ID NO: 1340 - DNA, 103 bp, synthetic construct
  source 1..103: mol_type = other DNA
tcgcgtaggcgtcaaaagcgtctcgagagttcgaatctctccttctccgccataagccaccgagatgcaataatccggtggttttttgtatgctttcttgtgc

SEQ ID NO: 1341 - DNA, 104 bp, synthetic construct
  source 1..104: mol_type = other DNA
ggaacttctggatgatatccgggaaggaaaggtggcaacagtcattaccaaagaccagtcccgacttggacgcaaccacatcgaaaccggaacgtatatggaaa

SEQ ID NO: 1342 - DNA, 105 bp, synthetic construct
  source 1..105: mol_type = other DNA
aggtccgcgaagccgagagcctcgacctcctcgtcgcgctcaattcgggcctgccgggaatggggacgatccacgcgaactccgcccgcgccgcgatcacgaaga

SEQ ID NO: 1343 - DNA, 119 bp, synthetic construct
  source 1..119: mol_type = other DNA
atgtatcctgctcaccttttagagtgccaatcgctagattagcagcagctcaggcagcgttgaataataaataagaggggacatttgccaagagattggcgtaggtttctctaaaataa

SEQ ID NO: 1344 - DNA, 102 bp, synthetic construct
  source 1..102: mol_type = other DNA
gtggaaagatgatcgacaagatcacaacttacgatgaataccttgcgtctgacgcaactgccgcgaaaaggcaggcaatcctggatctgaatacagaagaac

SEQ ID NO: 1345 - DNA, 106 bp, synthetic construct
  source 1..106: mol_type = other DNA
atgtggtttgacgagatcccagacctgttgactatcattggtattgcgatgattgtggttccgttaatgcccatccgctggcgcagaagaaaaaaacccaccgaca

SEQ ID NO: 1346 - DNA, 105 bp, synthetic construct
  source 1..105: mol_type = other DNA
agagtgcccggcgtgcgctggaagtggcggcggcgggcggccacaatctcctcatggtgggtccgcccggctcgggcaagtcgatgctcgcccagcgcctgcctt

SEQ ID NO: 1347 - DNA, 121 bp, synthetic construct
  source 1..121: mol_type = other DNA
caaccacgagtatacatggcatagcatatgcacctctctttattaaatattcatcttaaaatgctccaatgcctccacaattgctctctctttatcttccggacactgtggttgcctactg

SEQ ID NO: 1348 - DNA, 108 bp, synthetic construct
  source 1..108: mol_type = other DNA
gcacggcccgttcgacgccacgatgatccagatcggcgcgtactcggacttctggcccgacatccacatgcgccccgaggaaggcgtccgcgcccacctcgacctcca

SEQ ID NO: 1349 - DNA, 103 bp, synthetic construct
  source 1..103: mol_type = other DNA
cacccagaaaataacggcacttccgctatactttgtgcgattccgaccgtgaatggattaatcatgccacctaagaatccaatccctgcacctagagcgatca

SEQ ID NO: 1350 - DNA, 111 bp, synthetic construct
  source 1..111: mol_type = other DNA
ctgcactctcatgtataaaggttttatagttctttttcattcctataggtgaacatccaccacgaatatatccagtatgctttaatatatctttaactggtatcatttcaa

SEQ ID NO: 1351 - DNA, 106 bp, synthetic construct
  source 1..106: mol_type = other DNA
ctataacaaaaaagctaagtaattgattgctcaattcttagcttttcgtggtacccagacccggggtcgaaccgggatggaagtgaatccactggtgtttgagacc

SEQ ID NO: 1352 - DNA, 114 bp, synthetic construct
  source 1..114: mol_type = other DNA
aaaataaataaaattgcagatgaattatagaaggagatattagcatggcttgtacaacaatattggttggtaaaaaggcttcttatgatggttcgactatgatcgctagaacgg

SEQ ID NO: 1353 - DNA, 114 bp, synthetic construct
  source 1..114: mol_type = other DNA
aaaaatgaaaataaaaaaatggccgaagccattttttttatctcgaacctttttcgtaaggtgacccatttgctgctggaccatttgtctttcctacaaatcccgcaagagcaa

SEQ ID NO: 1354 - DNA, 105 bp, synthetic construct
  source 1..105: mol_type = other DNA
tttttaactctgcaacagttataccatatttgttggcaatgctataaagagtatcacctctttgaacagtataggtatccccactaacaccaggtggtgtgtatt

SEQ ID NO: 1355 - DNA, 102 bp, synthetic construct
  source 1..102: mol_type = other DNA
ccaatgcgataggcaaatcaaaacgaccgccttctttaggtaaatctgccggggccaaattgaccgtaatgcgcttggctggaaactggaaatttgaattga

SEQ ID NO: 1356 - DNA, 102 bp, synthetic construct
  source 1..102: mol_type = other DNA
caaccgaaggcaactacaaaaatggttgtatgcaggatatccattggaccgatggctcatttggctatttcccttcatacacattaggggcgatgtatgcgg

SEQ ID NO: 1357 - DNA, 105 bp, synthetic construct
  source 1..105: mol_type = other DNA
atccaaggaaaagaagacaagctaggattgacggcttatgacccaaccatggggtcaggatctctgctcttaaacaccaagaagtacgctgatgagaacgtggag

SEQ ID NO: 1358 - DNA, 108 bp, synthetic construct
  source 1..108: mol_type = other DNA
gccgacgccgccgccctccgcgaagtggccgcggatctgcaccacttcgaaccagtcgaggttgcgcagcgtctgcgacgcgcgggacaggccgttgcggatggcctg

SEQ ID NO: 1359 - DNA, 110 bp, synthetic construct
  source 1..110: mol_type = other DNA
ggccgcccgcacccgatccttgctttctttgacctcggtttctggcaggccaacaatggtaaagctgggtagtccattcgccaagtggacttctaccaccacttctggcg

SEQ ID NO: 1360 - DNA, 105 bp, synthetic construct
  source 1..105: mol_type = other DNA
aaatacctaaatcgactccagttgtattatcacgaaccatccaacgtaaaaacatgttaattcttttggatgcagaaccttttaaagggtcagaaacatgtttta

SEQ ID NO: 1361 - DNA, 111 bp, synthetic construct
  source 1..111: mol_type = other DNA
tcagggtacatctggagttttatgcggtgtgcatggtggacatatttatttgtatgaatacttgtatcaagcgcaattcgtaatgaaacattatgactttaggcaaattca

SEQ ID NO: 1362 - DNA, 104 bp, synthetic construct
  source 1..104: mol_type = other DNA
acagcgcagcaaacagcccggcaatcatggtgatgtgcaggcccgaaatactgaccagatggctgatgccggtgcggcggaacagctcccagtcttcgcgggcg

SEQ ID NO: 1363 - DNA, 105 bp, synthetic construct
  source 1..105: mol_type = other DNA
ccttccactcgaaatagggcaactgccacttctctccatctcaggcccgataatgatccattatcgtgcctaattgacggcaaagattcgcaaaaacaaggctct

SEQ ID NO: 1364 - DNA, 106 bp, synthetic construct
  source 1..106: mol_type = other DNA
aaatcccctgataatgcgattccgtgaccaaaaaggttcatcgccatcgccacgccaagtgcaggtaaaccagcccgtaaggcaacggggagcaggacagcaccaa

SEQ ID NO: 1365 - DNA, 102 bp, synthetic construct
  source 1..102: mol_type = other DNA
acagcttcagaaagccctcgaagtcctcgggatcgaacttcttggtccccatgaactgccagttgatcggccccagcttgtcgcccagcaccgtcagcccct

SEQ ID NO: 1366 - DNA, 111 bp, synthetic construct
  source 1..111: mol_type = other DNA
gtcgttctggtcttatagctacacttataattggaggtttagtacaagccactccaatccaaccaacagtaaatacatttacttttcctttgttatttttagatgtaataa

SEQ ID NO: 1367 - DNA, 102 bp, synthetic construct
  source 1..102: mol_type = other DNA
actctcaaaaatgttcacgctttcaacacctagcctctatttgtggttgggaccaagcttcaatgatgcctgcaggtggaaaccaagcacgtagcgaagcca

SEQ ID NO: 1368 - DNA, 103 bp, synthetic construct
  source 1..103: mol_type = other DNA
tagatccggctcaggccgagatcgtattcgagcttcattttgtggaatgtttttccaaacgaccaatggtggaatctggttggcattccgtacgctccaaagg

SEQ ID NO: 1369 - DNA, 108 bp, synthetic construct
  source 1..108: mol_type = other DNA
cttaaagacataagagaggaaaatatctttactgaacctgctaataaagaaactgcaacctgtataggtctttcagcagctaagcttttaaagaaagataaggatgca

SEQ ID NO: 1370 - DNA, 102 bp, synthetic construct
  source 1..102: mol_type = other DNA
aagtgttaactccgcacttggtcaaaacaaaatttggctggcatgtggtcaaggttctctacagaacatagcctctacccagagctcatgagctgactttcg

SEQ ID NO: 1371 - DNA, 106 bp, synthetic construct
  source 1..106: mol_type = other DNA
agaccgacacccgccactacgcccacgtcgacatgcccggccacgccgactacgtcaagaacatggtgaccggcgcggcgcagctcgacggggcgatcctcgtcgt

SEQ ID NO: 1372 - DNA, 106 bp, synthetic construct
  source 1..106: mol_type = other DNA
aaaggtaacggttgagtaactataaaaattaaaacgggtggccctataattagttttatgtagccacccgaataactgcaaaataaatgtttttagcgaaggttag

SEQ ID NO: 1373 - DNA, 107 bp, synthetic construct
  source 1..107: mol_type = other DNA
cgggcgcagctcgtcgagcacgtgcaggcagttgatgcagcagaaggtccagaagtccagcaggacgatcttgccccgcaggtcggccagcttcaggtcccgcccgc

SEQ ID NO: 1374 - DNA, 107 bp, synthetic construct
  source 1..107: mol_type = other DNA
gctgagagacggggaatgcttccctttctaatcattattttgaggaattatgggcaacactaagttggctaatccggcaccgctgggccttatgggcttcggcatga

SEQ ID NO: 1375 - DNA, 109 bp, synthetic construct
  source 1..109: mol_type = other DNA
caacgtatggctggcccagcgcacgcgatcacccatgtctcggatacggcccggtggacggccttgcaccgggccaccgaatcggcccgccccgacgcgttgttcagcg

SEQ ID NO: 1376 - DNA, 103 bp, synthetic construct
  source 1..103: mol_type = other DNA
tatcagttttttgaaaaagtgatgtccctgctgaccggcattatgttcattaccgtcgtcggcaccgctgtcatcgttctgccccagctggatcaaattgcca

SEQ ID NO: 1377 - DNA, 104 bp, synthetic construct
  source 1..104: mol_type = other DNA
catggtgaatatggatggcaaaaataaactttgatctgataatcctgttctaagaacctgtttaaaatctagctaatttggtatgatagttcaaaaaaggtaat

SEQ ID NO: 1378 - DNA, 103 bp, synthetic construct
  source 1..103: mol_type = other DNA
cccaaagaggccgtctgcatccataccagaaaggtttatgattcctgccgtgataaggaatgtctgcaggatctgcgggtttatcccacccgttgttcccagg

SEQ ID NO: 1379 - DNA, 104 bp, synthetic construct
  source 1..104: mol_type = other DNA
ttctctacgttggtagagaacaaaggcaaactggtgtttaacgcttgccgtgtgttcgcacgtcatttcgtggttataccactgtggggcgcgccttccgtcga

SEQ ID NO: 1380 - DNA, 105 bp, synthetic construct
  source 1..105: mol_type = other DNA
ctccctgttcttccagccagcggcgtgcttttttgatggtgtcacaatttttgatgccgaacatggtcagcgaggtgtgctgcggtttgtctgtcatggcgtaaa

SEQ ID NO: 1381 - DNA, 110 bp, synthetic construct
  source 1..110: mol_type = other DNA
agggcggcggggaggtcaccatccgtgatctgatcagggcgtccctgagaatgcgtccaagccggattattgtaggggaagtccgaggcgctgagaccatcgatatgctc

SEQ ID NO: 1382 - DNA, 101 bp, synthetic construct
  source 1..101: mol_type = other DNA
gcacctgtaacggtgggcccgtccgactcggatcgggcccaccgttcttcgtgaccgcgaggcgtttacttcggtgcgtgcatcgctgcgtagatcatgac

SEQ ID NO: 1383 - DNA, 108 bp, synthetic construct
  source 1..108: mol_type = other DNA
ttataacccttggaatcaaggtagcgctgggcatctttacagtgcgggcatttatcttttacgtataggacgagtcgtttcattttcttacttccaaaaatagagcca

SEQ ID NO: 1384 - DNA, 110 bp, synthetic construct
  source 1..110: mol_type = other DNA
atctttggtaagcttgtagatcatggttgcaatcatttccaggtgagcaaattcttccgtagcgatgtcattcagcagaccaatgatcttatcaggaatcgtataacgtt

SEQ ID NO: 1385 - DNA, 111 bp, synthetic construct
  source 1..111: mol_type = other DNA
aataaaaaacaagattagaaagtagtttctaatcttgttttctttatggcagccccacggggaatcgaaccccgactctcggactgagaatccgatggactggccgttatc

SEQ ID NO: 1386 - DNA, 104 bp, synthetic construct
  source 1..104: mol_type = other DNA
atatagttgagcaagatggaaataaacacttctttattgaaacatggggttgtcaaatgaatgaagaagattctgagaagctttctgggatgcttaagtctcaa

SEQ ID NO: 1387 - DNA, 105 bp, synthetic construct
  source 1..105: mol_type = other DNA
caatcgatccaccaattttaatgatggccgttccgtctgccatgactggtacaccttgttcagtatagacttcaggtgttgaaacatctagcttgctagatagta

SEQ ID NO: 1388 - DNA, 102 bp, synthetic construct
  source 1..102: mol_type = other DNA
aaccggcattgagcagggcgctgcgcacgcggtccttgctctcgcgcaccgcggtttccggcaggccgaccagggtcagcgaaggcaggccgttggccaggt

SEQ ID NO: 1389 - DNA, 104 bp, synthetic construct
  source 1..104: mol_type = other DNA
gccctgtgctacctgtaaaaagatccatgcttcgtccaaatccacaatcttaaacaggctgcggtcggtgtggatgaagtcgagggcaaaggtgctgattacaa

SEQ ID NO: 1390 - DNA, 114 bp, synthetic construct
  source 1..114: mol_type = other DNA
gctttgtaaggttgatcatagaaccttatttcatgaaccctacagaaaccctattgcaataggatttctgtagggtttcaatttaaaacatttcctgtttggcagtatatttca

SEQ ID NO: 1391 - DNA, 105 bp, synthetic construct
  source 1..105: mol_type = other DNA
gcacatcgatcccccgcccggtcaggaactccgccgggcccatctgatcgaagaagatgaacggccccaccatctgcctgcgggccgagggcagcgcgcggcgca

SEQ ID NO: 1392 - DNA, 110 bp, synthetic construct
  source 1..110: mol_type = other DNA
gagatctacttctgcgaaactaacgtttcttctcaagtagtgtcactgtctcaacgtgccaagtttgtgggaacatatctaatggttgaacttgctcgaagtcatagcct

SEQ ID NO: 1393 - DNA, 111 bp, synthetic construct
  source 1..111: mol_type = other DNA
tgaatgtagtcattataaataaagtactacgtataagcaattttttaaacacctttcaaaaatgtaaggtttttgtcatttgaatcgatggaaggtatttccgcactttac

SEQ ID NO: 1394 - DNA, 113 bp, synthetic construct
  source 1..113: mol_type = other DNA
cggaccgcccttccggaccgccggggcaataggctggcaggcatgacgacggcatacggcttcaccgagtacggcggccccgtcacacagtcctacttcgacgtcaccctccc

SEQ ID NO: 1395 - DNA, 102 bp, synthetic construct
  source 1..102: mol_type = other DNA
aacgagaccgctttttgcggtccgggctgacccacctgctggtggtgtcgggacagaacgtggcgctcatgttggtgttgtgcgccccgctgatcacgaggg

SEQ ID NO: 1396 - DNA, 105 bp, synthetic construct
  source 1..105: mol_type = other DNA
gcggctgccataccagacagatgcctgtaccgatgatgaatatcttaaatgggggacgtcacgctgacaatacggtggatttacaggaattcatgatcatgccga

SEQ ID NO: 1397 - DNA, 111 bp, synthetic construct
  source 1..111: mol_type = other DNA
aagtgttaactccgcacttggtcaaaacaaaatttggctggcatgtggtcaaggttctctacagaacatagcctctacccagagctcatgagctgactttcgagtttcttg

SEQ ID NO: 1398 - DNA, 103 bp, synthetic construct
  source 1..103: mol_type = other DNA
ggcgccgaagcgctccttgaagaacagggccccgatcgccgcaccgacgatgaccgaggattcccgcaaggccgcgacgggagccagctcggcccgggtctgg

SEQ ID NO: 1399 - DNA, 115 bp, synthetic construct
  source 1..115: mol_type = other DNA
ggagatgcggaaacatacaaagaaaaccccgggttcaaaaacccgggggataactcttggtagccgtaccggattcgaaccggtgatctccgccttgagagggcggcgtcctgaa

SEQ ID NO: 1400 - DNA, 102 bp, synthetic construct
  source 1..102: mol_type = other DNA
caaatactggaaaggatttagatgatctcatatctattggaaccattggacttataaaagccatatccacctatgacaaaaaaaaaggcaccagattggcaa

SEQ ID NO: 1401 - DNA, 112 bp, synthetic construct
  source 1..112: mol_type = other DNA
actatggtctggccattgcggctttgctggggattttggacaaggtatcattgcccaatgggtaaaaatacgttaaaatgagaagtaagtttgaaaatacaggagattaaac

SEQ ID NO: 1402 - DNA, 105 bp, synthetic construct
  source 1..105: mol_type = other DNA
gctggccgatgttgtcggtgcggatcgaggagatctgcacggggtcgcccgcctcgatcatccggccgtcgccgatgaccatcgcgacgtggccgctccacacgg

SEQ ID NO: 1403 - DNA, 104 bp, synthetic construct
  source 1..104: mol_type = other DNA
ggtatttccgattgcaatcgcactcggtatcgatcctattcacttgggcatcatgatggtggtcaacatggagataggtatgataaccccaccagttgggctca

SEQ ID NO: 1404 - DNA, 102 bp, synthetic construct
  source 1..102: mol_type = other DNA
gcgtcgctgccgcctgcgcgacagcctgaatatcgattgggtacttcgggttgccggggtggctaataatatgcacgttgccgctggcaatggtggcaatca

SEQ ID NO: 1405 - DNA, 105 bp, synthetic construct
  source 1..105: mol_type = other DNA
catccacaacatccacagagctacaaccaccagcggccattagcaccatttccattgggcttggtgccgttgcaccaccgttaccatccatcacgattgagtgac

SEQ ID NO: 1406 - DNA, 109 bp, synthetic construct
  source 1..109: mol_type = other DNA
cacccgcctcgacgaccacggtggccgcgctgaccgccgcgatgaggcggttgcgcaggaggaacctccagcgcgtcggcgacgccccgcacggcagctcggacaccac

SEQ ID NO: 1407 - DNA, 109 bp, synthetic construct
  source 1..109: mol_type = other DNA
gcaacaaggaaatagccaagggcatgttcctcagcagcaagactgtcagcacctacaagaagcgcctcatgcacaaactgcaggtcagtacactggttgacctgatcga

SEQ ID NO: 1408 - DNA, 114 bp, synthetic construct
  source 1..114: mol_type = other DNA
atcccgaaggacgaggggctttcgcggcgaaaaccgctgcggatcaacgaccgccgaagttcttgaagcgctggttgaacttctcgacgcgaccggccgagtccatgatgcgct

SEQ ID NO: 1409 - DNA, 103 bp, synthetic construct
  source 1..103: mol_type = other DNA
gcctcgacgaccaccaccgcgtcggccaacgcggcgatgagtctgttgcgcgccaaaaacctccacttggtcggcgccgctccgcacggggtctcgctccaca

SEQ ID NO: 1410 - DNA, 105 bp, synthetic construct
  source 1..105: mol_type = other DNA
ggatttgacataacggctataggtcttacatcaaatggaacaccatttgaatctgttggataaattccatatccattttgtgcatagtttgaaccaagacctgca

SEQ ID NO: 1411 - DNA, 108 bp, synthetic construct
  source 1..108: mol_type = other DNA
gacttaaaatctcctggccgtatggccgtgcgggttcgagtcccgccgtccgcaccatacaagaatgggtcaggtcaggagcggtgagtgtcctacacactggtggca

SEQ ID NO: 1412 - DNA, 106 bp, synthetic construct
  source 1..106: mol_type = other DNA
ggattgcgagcctttttccagccttttatatatgaatttgtgatgtaacataatgtaaatcttcatataaaaaacgctgatggcccgttgtgttggttttgcgtga

SEQ ID NO: 1413 - DNA, 107 bp, synthetic construct
  source 1..107: mol_type = other DNA
ccagccgtggagccatggcacgtatcagccccggatcctggtaggccgacccgtggtgggcgaccttcagcacatccacggctcccagtgccgcggcttccggggag

SEQ ID NO: 1414 - DNA, 111 bp, synthetic construct
  source 1..111: mol_type = other DNA
acgctatacgatgccttatccaagaattcaagccttattgacagacattggaacagacgaacttgctcatgtcgaaattattagtacccttttctatcaacttaccaatgg

SEQ ID NO: 1415 - DNA, 110 bp, synthetic construct
  source 1..110: mol_type = other DNA
gcaaaagccgttctgcacgtcaatcaaaatcgtagcgttgctccttgaagggatcgccatacatgtggtatccgttgcgctcccagaatcccggcttatccttctccata

SEQ ID NO: 1416 - DNA, 116 bp, synthetic construct
  source 1..116: mol_type = other DNA
attaccgctatgttcaattaatcccatctttctgaagccgatttgcacaatcggcttcccgtttcgctcaacttagtataaaaaagcaggctttcagatccccttttaaatttgca

SEQ ID NO: 1417 - DNA, 111 bp, synthetic construct
  source 1..111: mol_type = other DNA
atggaagtgaccccgcgatcgggccaatgcaaccatggccggcccacctgggtgaagctcggccatggcgatatcgagaaactgttcgggcgaaagtgacggcctggcgtc

SEQ ID NO: 1418 - DNA, 105 bp, synthetic construct
  source 1..105: mol_type = other DNA
atctatgtccccatagaatggcgtttttcttcctctataaaataatcatcgcatctccgaagctgaaaaaacgataccgttctttcactgcctcttcataggctg

SEQ ID NO: 1419 - DNA, 102 bp, synthetic construct
  source 1..102: mol_type = other DNA
tgcagccctatctggacgaccccgaggtcgaggagatctggatcaacgggcccgccgagatctacgtggcccgcggcggcgagtccgagctgaccagcctgg

SEQ ID NO: 1420 - DNA, 106 bp, synthetic construct
  source 1..106: mol_type = other DNA
agcggcccggcctccgccagcaacgaatcggagaagccctcgacggcgtgcttggaagccgcgtaatacccggaacccggaaagcccgcgagccccgccaccgacg

SEQ ID NO: 1421 - DNA, 112 bp, synthetic construct
  source 1..112: mol_type = other DNA
agagaagctcttgtacgcttctcttaatatatctaactaacttacaacacgtatagaaccttgattacatgccaaccaaacttagtttttactggctctgggatcaaacctc

SEQ ID NO: 1422 - DNA, 126 bp, synthetic construct
  source 1..126: mol_type = other DNA
caacttttagcgcacggctctctcccaagagccatttccctggaccgaatacaggaatcgtattcggtctctttttgtgtactttataaaccaaaaggttagaatgcacggtgccaaaacacacga

SEQ ID NO: 1423 - DNA, 106 bp, synthetic construct
  source 1..106: mol_type = other DNA
aaaaagatgtaaatatggtaacaaatatagatttttcagcaactgctggtgcatataaaggtggtactggagactatgttgcattatttgaacctacagcttcaac

SEQ ID NO: 1424 - DNA, 102 bp, synthetic construct
  source 1..102: mol_type = other DNA
atttgtacggacaacccacaacatggtcattaaccatgcctgtcgcttgcatgaacgcgtaacagattgtttcccctacaaacttaaagcctcttttcttca

SEQ ID NO: 1425 - DNA, 104 bp, synthetic construct
  source 1..104: mol_type = other DNA
cgtcctccaggtgggtgaagtgcgccatgttcgggtcctggcagttcggcatgcgcgattgcacgtcgacaatcaccgcgtcctccagctcgatggtgaagtag

SEQ ID NO: 1426 - DNA, 108 bp, synthetic construct
  source 1..108: mol_type = other DNA
aaatgccatggaaaaactaaacctatcggcaagagcctatgatcgaattttaaaagtatcaagaactatagccgatttagcatccgaagaaaatataaaatcggaaca

SEQ ID NO: 1427 - DNA, 112 bp, synthetic construct
  source 1..112: mol_type = other DNA
attaggctataatgcggcaattgatacagcctgaaaataccatgaagaaaacttcttttagaaaacaccgggttgagcgattcagctcacaacaagccaccagaagcccaaa

SEQ ID NO: 1428 - DNA, 124 bp, synthetic construct
  source 1..124: mol_type = other DNA
agggcgtcatccgatcgacgttcgtcgtggacgaaaagggcaacatcgaggtggcacagtacaacgtgaaggccaccggccacgtcgccaagctgcgccgcgacatctccgtctgaggcttgag

SEQ ID NO: 1429 - DNA, 112 bp, synthetic construct
  source 1..112: mol_type = other DNA
cgatgagatccagcgccccggcctcctcggccaagtacagcgggttctcgtagcgcatgtcgatgacgccggtgcccacctcgatgcggctggtggtcgcggcgatggccga

SEQ ID NO: 1430 - DNA, 105 bp, synthetic construct
  source 1..105: mol_type = other DNA
caatgaaaaaccctaaagttgcaggtttaatcaacgatattgcggtggaagaacttgggcatctcgaaatggtcggttccattgtttcccagcttgtaaaagacc

SEQ ID NO: 1431 - DNA, 111 bp, synthetic construct
  source 1..111: mol_type = other DNA
cgtgtcagcgcagtgatcgcaacgtagatcaggaagcgcacgggcatgtggttggtcttgaagtaaatcccaaccatcgcgcccaattccaaatagatgaacagcagcaag

SEQ ID NO: 1432 - DNA, 114 bp, synthetic construct
  source 1..114: mol_type = other DNA
ataatttggatgatatgtgtgcttcaagctggaagtggcagaccatgaatccaaatgggtataatgattagatcatcttcggatggtctttttattttacttttagaacagccc

SEQ ID NO: 1433 - DNA, 109 bp, synthetic construct
  source 1..109: mol_type = other DNA
gcgggtacatacaacgtgcgcacgccgccaacctgcatgcccatcaaaccctggtcccaacccttgatcacgcggccagtgccgattacgcactggaacggtttgcccc

SEQ ID NO: 1434 - DNA, 111 bp, synthetic construct
  source 1..111: mol_type = other DNA
gttcctgccgaacttcaacgtcaagagcgcgcatctgatctacccggctgccgacttgtcggagcagatctccaccgcgggcaaggaagcctcgggcaccgggaacatgaa

SEQ ID NO: 1435 - DNA, 102 bp, synthetic construct
  source 1..102: mol_type = other DNA
cttacgcagctctttgtatcgccatttttaaaatcttcaatattcctctaaacaaatggacggtcccgacagctgtacttggtggcgtagtgttggtgggca

SEQ ID NO: 1436 - DNA, 108 bp, synthetic construct
  source 1..108: mol_type = other DNA
tctcatctttaatatttttataggctgacataagtgtactatggcggttgtactggttcacttccccatacccaaacatattacacttcttcattaattcttcaacaa

SEQ ID NO: 1437 - DNA, 114 bp, synthetic construct
  source 1..114: mol_type = other DNA
cgtattatttttcaccatacctgacattgtaaatgtggaactgtacaatttggtggaggtggagggagtcgaaccctcgtccgaacatattgtcatacaactttctccgagcgc

SEQ ID NO: 1438 - DNA, 115 bp, synthetic construct
  source 1..115: mol_type = other DNA
ggggacctggaacttcgtttgaaaccctgccgaagcagcatttccaaattttggagcgggaaacgagactcgaactcgcgaccccgaccttggcaaggtcgtgctctaccaactg

SEQ ID NO: 1439 - DNA, 106 bp, synthetic construct
  source 1..106: mol_type = other DNA
cgtaaggagcagatatgaacagacaacacggattcactcttattgagctgatggtggtcatcggcattattgcgattctgagcgccatcggcatacctgcctatca

SEQ ID NO: 1440 - DNA, 104 bp, synthetic construct
  source 1..104: mol_type = other DNA
agctgtaattcctttcgccttgggattaggctgcggcacaatggcagttatggtaacgcgaacattggaaacacgccgagaaagaatattagctactttcttat

SEQ ID NO: 1441 - DNA, 100 bp, synthetic construct
  source 1..100: mol_type = other DNA
ccggcgcggtgagccgggcgcaccgcggtgtgctgttcctcgacgagtcgcgagatggggacgaagacactcgaagcactacggacaccgctcgaggacg

SEQ ID NO: 1442 - DNA, 105 bp, synthetic construct
  source 1..105: mol_type = other DNA
tctcgtcactaagccatgctcgattagcgtttttagactggcgcagcgattacaacgatcaccgaccgcattccggccccggctggatgacacctgccgagtcca

SEQ ID NO: 1443 - DNA, 107 bp, synthetic construct
  source 1..107: mol_type = other DNA
agcagcttctgcatccacccaaatattaaattcagcggtaggcgtccaattcccgaaagtaccgcctcccataattgtaatagaatcaattgattgagcaatactag

SEQ ID NO: 1444 - DNA, 105 bp, synthetic construct
  source 1..105: mol_type = other DNA
gtctgagcgaagatgccgaaatcatcatgtttgaacgtggcccgtttgtttcatttgccaactgtggcttgccttatcacatcggcggcgatatccaagaacgca

SEQ ID NO: 1445 - DNA, 106 bp, synthetic construct
  source 1..106: mol_type = other DNA
cgacgccttcctggtccagctcgttggaataggactggtatgaaccgaacacgactgccttgtcttcccattcccagaagcgcaaggtagggccgcgctttcctgc

SEQ ID NO: 1446 - DNA, 103 bp, synthetic construct
  source 1..103: mol_type = other DNA
agcgcccggccgacgatctcctcgctggtgccgtcggagtagacgttcgccgtgtcgaagaagttgatcccggcgtccagcgcctgccggatcaacgggcgtg

SEQ ID NO: 1447 - DNA, 104 bp, synthetic construct
  source 1..104: mol_type = other DNA
cacttctccatcttccacaagctgtatcatagccttaaaggatggtctgtcaaaggttgtgccggatataccatcatcagtgaagtgcctgaacctggtccacc

SEQ ID NO: 1448 - DNA, 107 bp, synthetic construct
  source 1..107: mol_type = other DNA
gctccaacatatctaataaaagcttcattattcgtaagtctcatatgcaccatatctctcctacccgctgtatctaccaatacattagcaacattattttcttccaa

SEQ ID NO: 1449 - DNA, 120 bp, synthetic construct
  source 1..120: mol_type = other DNA
tcatcaaaggctaacacactaattattaaacctaatgatgccataactgttccacccggaactcctggtgctcctattgcgaacactcctaataataatataaatagtatcatagttggt

SEQ ID NO: 1450 - DNA, 105 bp, synthetic construct
  source 1..105: mol_type = other DNA
agacaaaaggagttttcgatatgaaggcaactggaatcgtgcggcggatcgacgacctgggccgggtggtaatccccaaggagatccggcgcaccatgcggatcc

SEQ ID NO: 1451 - DNA, 101 bp, synthetic construct
  source 1..101: mol_type = other DNA
gcgtctcgacctgcgttcggccggtgtgcgcaacaccgacgccatcgtcatcaccgaggcctcatgtctggtgctccgtttccccaattcccacatgcgca

SEQ ID NO: 1452 - DNA, 111 bp, synthetic construct
  source 1..111: mol_type = other DNA
atatcaggatgatgataagggagtgtatatagatgggtgcatcatgcgggattgtaggtcttcctaacgtaggaaaatcgacattgtttaatgccattacacaagcgggcg

SEQ ID NO: 1453 - DNA, 103 bp, synthetic construct
  source 1..103: mol_type = other DNA
tgaatggcgtaaagtctttgaaacgcatagaaagaaataagcggagacgggaaaagctttcccgtttacgcttcgccgtccgccggtcagacaggactgttct

SEQ ID NO: 1454 - DNA, 112 bp, synthetic construct
  source 1..112: mol_type = other DNA
agctggccctgctgctgcgcgaactccaccccgaggtcaaaccgggctggcacatgaataagcagcactggaacacggtcaccttcagcgacggcctggccgacgatctctg

SEQ ID NO: 1455 - DNA, 101 bp, synthetic construct
  source 1..101: mol_type = other DNA
cggccgttaccgacttcctgcgcgacgtccgtcctgccgcggcggagcgtgagcgacgtatcagccgggagggcatggtcagcgtcggcggcaatttctac

SEQ ID NO: 1456 - DNA, 110 bp, synthetic construct
  source 1..110: mol_type = other DNA
gcgttcagaacccactgttctttaaagaaaacacttcgatgctgtttggcgacgctaaagaaagcgtagaggcgatttttaaagcgttgtaatcgaaattgttttaaaac

SEQ ID NO: 1457 - DNA, 111 bp, synthetic construct
  source 1..111: mol_type = other DNA
gcgtccccgaggccgaggccgtacggaaagggtgaggcgtgaacggaccgctgatcgtccagagcgacaagacgctcctgctcgaagtcgaccacgagcgcgccgacgcct

SEQ ID NO: 1458 - DNA, 102 bp, synthetic construct
  source 1..102: mol_type = other DNA
actgtgccaggcacagcaggacctcgtcgccgcgggcgtagccgtagagatcgttgaagggtttgaagctgtcgatgtcgatgtagcagatcaccgcctcgc

SEQ ID NO: 1459 - DNA, 104 bp, synthetic construct
  source 1..104: mol_type = other DNA
tcaacccttcttatttatccaccctagacatcaatgctaccaactcaacgtgtgctgtatgcgggaacatgtcaaccggttggacggtttttaatgtatatcca

SEQ ID NO: 1460 - DNA, 103 bp, synthetic construct
  source 1..103: mol_type = other DNA
aagagaagcgtgtgctggtcgtggatattggcggcggcaccaccgactgctccatgctgctgatggggccgcagtggcgtcagcgcgccgatcgtgaaaacag

SEQ ID NO: 1461 - DNA, 112 bp, synthetic construct
  source 1..112: mol_type = other DNA
agcctgcctgctttgcagtaaggtcgccgttgtagccctgtttaagatttacaccaacctctgaagctgcttccatcttgaaacggttaagtgcttccttagcctcaggtac

SEQ ID NO: 1462 - DNA, 109 bp, synthetic construct
  source 1..109: mol_type = other DNA
cgatcaccggcgccccctttcccagcgcagcgccgacgccggttaccagtcggccccagcacgtgacgttgatgaagagggagttcgaattcacccaactgccgtcctc

SEQ ID NO: 1463 - DNA, 103 bp, synthetic construct
  source 1..103: mol_type = other DNA
gggaaatcaacatgacaaaacaacaaggatttacgctgattgagctgatgatcgtcattgcgatcgtcgccatcctcagcgctattggcgtaccggcttatca

SEQ ID NO: 1464 - DNA, 108 bp, synthetic construct
  source 1..108: mol_type = other DNA
cgaccgccgctgatgtggtcgaccgtccgcgccatgtcggcgaggaggtccgggttgcggtagctgttgcacgtgacgagggcgccgatctcgacgcgctcggtctgc

SEQ ID NO: 1465 - DNA, 104 bp, synthetic construct
  source 1..104: mol_type = other DNA
cgaatttgacggaaatgttttcaaacaacggcttactgccgaactgcatggtgacgttactggaaactaacacaggcgtatcctgaaaagagatatgacaaacc

SEQ ID NO: 1466 - DNA, 104 bp, synthetic construct
  source 1..104: mol_type = other DNA
cttctcagttccaatctcggcagcctctacaaaaggaattggttcactataccaaggagtcattacatatctaggaccattctcatcatccactcccttagcat

SEQ ID NO: 1467 - DNA, 107 bp, synthetic construct
  source 1..107: mol_type = other DNA
ctacaggcactagcctgtttctacattctattattacagaggctttatgcacaccaacaagttggcaaatcccggccccctgggtctgatgggttttgggatgacta

SEQ ID NO: 1468 - DNA, 108 bp, synthetic construct
  source 1..108: mol_type = other DNA
atcgccgccgccggcggccaccacctcgccctactcggcccacccggcgccggcaagaccatgctcgccgaacggctcccgtcggtcctacccgagctgcccgacgac

SEQ ID NO: 1469 - DNA, 106 bp, synthetic construct
  source 1..106: mol_type = other DNA
atatatcgctaagtgacgaaaggagtgcataaagctcagccgatgaagcactatcaccgtcaacccctccataattttgctcaaaacatatatatgcgtttatcga

SEQ ID NO: 1470 - DNA, 117 bp, synthetic construct
  source 1..117: mol_type = other DNA
cagtgcgttttcataatcaatgaatgtaatcgggggaaaacagaatgatagtaatacctgtatataacgtgatacttgcccctaaggcaaaagtattcatgggccttgatcaggtgc

SEQ ID NO: 1471 - DNA, 115 bp, synthetic construct
  source 1..115: mol_type = other DNA
accttatgtccactaccaatacactgccgccgcgcgtcggatttgtctcgctcggctgtccaaaaaaccttgtcgactcagagcgcatcctgacggaactgcgcaccgagggtta

SEQ ID NO: 1472 - DNA, 109 bp, synthetic construct
  source 1..109: mol_type = other DNA
cgagccttccggcaatgcacccgtagctcagctggatagagtgctgccctaccgaaggcagagggcacaggttcgcatctcgtatcgggtgcgccacttacttgatgag

SEQ ID NO: 1473 - DNA, 101 bp, synthetic construct
  source 1..101: mol_type = other DNA
aagtgtaaaacgcgcattggaagtagccgcgtctggaggacacaacttgattatgatcggttcacccggaagtggaaagtccatgatggcaaagtgtatgc

SEQ ID NO: 1474 - DNA, 111 bp, synthetic construct
  source 1..111: mol_type = other DNA
agttaggagttaccgccctgatgtggcgccaacccaaggccgtatgggccgtcgctttcgcctccgtcgtcgccttcatgggcatcggactggtcgatcccatcctcaaac

SEQ ID NO: 1475 - DNA, 116 bp, synthetic construct
  source 1..116: mol_type = other DNA
gtcgatgccggggttgtctgcaagaaattcttcgcgtgcagcgtcaatggcttcttcaagcgttgcgtacatggtcatcacgattctccctttgagttgatgaggtttcagggaaa

SEQ ID NO: 1476 - DNA, 105 bp, synthetic construct
  source 1..105: mol_type = other DNA
tacattaaagcaattacaagaaaaagaaaacgaaacatatcagaattatgatatggagaatttattatatctttggcatatgaaaaatttggaaagcaatgaagg

SEQ ID NO: 1477 - DNA, 110 bp, synthetic construct
  source 1..110: mol_type = other DNA
gcggcggcggccgttggggctgatgtagcgcgccgcccagacgttgcacataccggtgtcgacggtgaagaccgcgtcgtccgcggcctcctcgtccagcacggacgcga

SEQ ID NO: 1478 - DNA, 114 bp, synthetic construct
  source 1..114: mol_type = other DNA
attctgttaataagcttcagatggagtaaaaactccctctgaagccaagaattctgtttataaagatattaattatttatattacatattgaagtacagctgtatatttttata

SEQ ID NO: 1479 - DNA, 105 bp, synthetic construct
  source 1..105: mol_type = other DNA
tccttgaagcggaaacgggcggggtatcataacttgccctcttacctcatagcgtaaaggacgttacaatgcggtgtaacggccgttacattacgatgtcaacaa

SEQ ID NO: 1480 - DNA, 107 bp, synthetic construct
  source 1..107: mol_type = other DNA
gctacggacacggttaactcgaggagtagtgcaaaatggcaaaaattatggtgctttattattccatgtacggacacatcgaaactatggcgcatgcggtggcggaa

SEQ ID NO: 1481 - DNA, 103 bp, synthetic construct
  source 1..103: mol_type = other DNA
ccgcggccgcggcccgcagattcggcgccagcttgcgccacttgttgcccggaagttccgggtggatcagatcgtcccgcttgagcagcagccgcaccccgcg

SEQ ID NO: 1482 - DNA, 105 bp, synthetic construct
  source 1..105: mol_type = other DNA
cctcgtggctgatgcagagcgtatccgcaaactttaaggctgtgcccgtggaactattaggttcacccacagttcccgtgcctgcacgcatcgagaaggaccagg

SEQ ID NO: 1483 - DNA, 106 bp, synthetic construct
  source 1..106: mol_type = other DNA
atactatgccgtataaagaagtaacaggaacactgacggatatcgggacagaagaactggctcatatggaaatgatctgtgccattgtgtaccagctcaccaaaga

SEQ ID NO: 1484 - DNA, 111 bp, synthetic construct
  source 1..111: mol_type = other DNA
gcgcggccgtgcaccgctcgacgccggcctcggggtagaggacgtgcgccttgccgtaggaggtggagaatgcctgcgatttgtcgggatgcttgtgcagcaggaagccga

SEQ ID NO: 1485 - DNA, 148 bp, synthetic construct
  source 1..148: mol_type = other DNA
aagagagcgcaattagctgttacctatgtctccgggtcggacaataggaaaatggcgcacccgacaggattcgaacctgtgacctttggaatcggaatccaacactctatccagctgagctacgggtgcatccggggcgaagcagggt

SEQ ID NO: 1486 - DNA, 107 bp, synthetic construct
  source 1..107: mol_type = other DNA
gcacagttttaataagtcgcctagttcaccagaggggaacccttttttatcgaaccacagcaaatattcttcaggcaagtcaatcaacgtacgaccagcgtatttac

SEQ ID NO: 1487 - DNA, 104 bp, synthetic construct
  source 1..104: mol_type = other DNA
ctggggacagatcccagtaggcatgggacgggcgggcatagcagtagatacagccatgctcgcaaccgcggtaggggttgatcgagcggtcgaagggcaggtca

SEQ ID NO: 1488 - DNA, 114 bp, synthetic construct
  source 1..114: mol_type = other DNA
aaaccaaacgtgaatttgcgctaaatgggctaaaagttgcggcccagtcattaattgaccgaaccaaggggattgaaatgcactgccgcctgactcaattaatccgctcagctg

SEQ ID NO: 1489 - DNA, 105 bp, synthetic construct
  source 1..105: mol_type = other DNA
ggccctgatcgatcagatgcgtgtactcgcagagcaggtcacggatcgccgactcggcgacgatccgtgacagctccgtggtcatacggtgatctcgcgccgaac

SEQ ID NO: 1490 - DNA, 103 bp, synthetic construct
  source 1..103: mol_type = other DNA
acaaaaatagccgataatgaaataccggctattcctatgattatcatgaccaatggatgtttttccatcaatttcatcttatgtatcctcgcttatatgattg

SEQ ID NO: 1491 - DNA, 102 bp, synthetic construct
  source 1..102: mol_type = other DNA
gtgatcgatataataaaaaataacaactaaaataaaaaagagataagctattggtttatctcttttttatttacataaatatattttctgtatttaatcagt

SEQ ID NO: 1492 - DNA, 104 bp, synthetic construct
  source 1..104: mol_type = other DNA
aggctggaattgataatcgcgctgcggacccggtctttgctttctttgaccgcggtttccggcagcccgaccaaggtcagcgcgggcaacccattggccagatg

SEQ ID NO: 1493 - DNA, 104 bp, synthetic construct
  source 1..104: mol_type = other DNA
acggcgtgatgcccccgcgcctcaaccagctcctttgcctgcgcgtccgccagaagaaaggtacacgcctccccaaaatctcctgcggcatctgcgatggaaag

SEQ ID NO: 1494 - DNA, 110 bp, synthetic construct
  source 1..110: mol_type = other DNA
cattacagggtccaggcaatgaataagaactctgctaggggaactagcaaaattagcacctgcatccaaaagcgcctcataatttgattggcaagcgcctgcaaaaataa

SEQ ID NO: 1495 - DNA, 106 bp, synthetic construct
  source 1..106: mol_type = other DNA
cccctcgacgttccgcacccgcccgtccgcggcgtaggccgccaggacgatcgccaggtcgtggcaggcgcctcgcttgtgcacccccgccggcagcaggttcacg

SEQ ID NO: 1496 - DNA, 102 bp, synthetic construct
  source 1..102: mol_type = other DNA
tcagaatggtttccaataaggcatataaagtcgtagttttgccgcttcctgtcggaccagtaaacagaatgatgccagatcggtttgatatccaatttttaa

SEQ ID NO: 1497 - DNA, 105 bp, synthetic construct
  source 1..105: mol_type = other DNA
atgtcggcggccgaaccgcatgccagcatggaacacgcgaaggccaggttgtaggagttgaccacccactgcaacggagcgtacccggcgtgcaggtcgacaccg

SEQ ID NO: 1498 - DNA, 102 bp, synthetic construct
  source 1..102: mol_type = other DNA
tgaatgattttaagccagctccgctcagaatatgaaaaagcccgatacagtactgtatcgggcttcgttattatctacaatcctctgctcacttgaagttct

SEQ ID NO: 1499 - DNA, 102 bp, synthetic construct
  source 1..102: mol_type = other DNA
tacgggtcaactggtggacgatggtggcgatcatttcgaagtgccccagctcttcggtgccgatatccgtaagtgttgccatacattccttataaggcatcg

SEQ ID NO: 1500 - DNA, 102 bp, synthetic construct
  source 1..102: mol_type = other DNA
caggtgagcgcgggtaaatgaatatctcgatgaatgcgtggctgctgggcaaaattgatgactataaattcagcgtgcgcgatgccacggtagatttctaca

SEQ ID NO: 1501 - DNA, 107 bp, synthetic construct
  source 1..107: mol_type = other DNA
atgataatcaaaaaacagggaaattaatgagccgtttgaccactgatctttttgaaatttcagaagtggcgcatcatggtccagaagacgtctttattacgattatg

SEQ ID NO: 1502 - DNA, 105 bp, synthetic construct
  source 1..105: mol_type = other DNA
tacagagaaacggactcgtcatgacagatagactctatgggattaagaactgcgacacggtaaaaaaagcacgaaaatggttggaggccaagggccagcaagtga

SEQ ID NO: 1503 - DNA, 101 bp, synthetic construct
  source 1..101: mol_type = other DNA
gattgatggcacaacgcccattccgcagtccacatcataccatatcagatgttgccttcgttggtggtggagcatatccacaacctggtgaaatttcatta

SEQ ID NO: 1504 - DNA, 105 bp, synthetic construct
  source 1..105: mol_type = other DNA
tgcgggctcattggatcggccgtaatgaccttttccgcttgataatcatacaaataagtgccattacaacaaatggcaggtgtatcgagcgccagtgcctgataa

SEQ ID NO: 1505 - DNA, 108 bp, synthetic construct
  source 1..108: mol_type = other DNA
tatagagaataaccttctacaatgatcgagtcgagaatcatcatttcggtcttgccattaatgcacactcttagtaactttgcgcgccgaaagacagagaaaaggaga

SEQ ID NO: 1506 - DNA, 102 bp, synthetic construct
  source 1..102: mol_type = other DNA
gttcaaattctttcgaatcaaaggctgctaaatacgtttttccaattcccgttgcagccacgacaagccctttatcaaagccttcttcacgtgttctcttta

SEQ ID NO: 1507 - DNA, 117 bp, synthetic construct
  source 1..117: mol_type = other DNA
ccgcaacgcttgcacgggagcccctcccgtccgtaagcatccagcgagcggtcgaagtaccccgactcaccattgacatcgacgtacagggcatcaaaggatgtcccaccctgggta

SEQ ID NO: 1508 - DNA, 116 bp, synthetic construct
  source 1..116: mol_type = other DNA
agcttgccgaagcctggcgtccgcatcgcggcgccgccgccatcatggcgtggcatcattataatacagaggttttgtaatccatgtcccctaccctgccccatgcccgctacatc

SEQ ID NO: 1509 - DNA, 102 bp, synthetic construct
  source 1..102: mol_type = other DNA
aaccagataactgcccactttgcaagcagggtgtgccaatgaccaagagaggcaggacaggaaaataatttgctaacagaataagaaaagctgtagataccg

SEQ ID NO: 1510 - DNA, 103 bp, synthetic construct
  source 1..103: mol_type = other DNA
cccgttcaagtattgcctcttgggtaatgcccggcttccagtccagagaatcaatactccactggattgtgaaatacccgttctgccttgcaattgaaataac

SEQ ID NO: 1511 - DNA, 112 bp, synthetic construct
  source 1..112: mol_type = other DNA
tttaagtaattttgacaaaaaataaaaggtggttaaaaaaccacctttttggtcgaggtgaacaggacttgaacctgcggcatcttggtcccaaaccaagcactctaccaaa

SEQ ID NO: 1512 - DNA, 105 bp, synthetic construct
  source 1..105: mol_type = other DNA
cagacgtcggtttcgatcgctcggtcaacccttaccgcggttgcgaacatggctgcatctactgctttgcgcggccatcgcacgcgtactgggatctttcgccgg

SEQ ID NO: 1513 - DNA, 102 bp, synthetic construct
  source 1..102: mol_type = other DNA
aagaatatttatggtttggatgtgtgcagagtgtttatcgatggttggatggcgttagtatgccaacagtcgataatctgtatgcaattagcaaaatgcttc

SEQ ID NO: 1514 - DNA, 105 bp, synthetic construct
  source 1..105: mol_type = other DNA
ccgacaacgccccgcgccgccaggcgcaaacggcaacccccacggcgggaaagccgacaacgtgggaagcaacgcaacccgcgtcagagcgcctgcgcgaacgtg

SEQ ID NO: 1515 - DNA, 108 bp, synthetic construct
  source 1..108: mol_type = other DNA
aagagatcctgatgcttctcccgctcgtcttcctgatccttccgctctcggtgctattcgccgtgtatccagggctgttcatcctccggctcggcatcggctgaccgc

SEQ ID NO: 1516 - DNA, 106 bp, synthetic construct
  source 1..106: mol_type = other DNA
gaatgaaaaaaagggctttcagcgtaaatactgaaaacccttgattttgttggtgggccgtgagggatttgaaccctcggccaacggattaaaagtccgctgctct

SEQ ID NO: 1517 - DNA, 105 bp, synthetic construct
  source 1..105: mol_type = other DNA
caaaaggaaacgtctttatcgaaaatggtatctggatcattatcgtagtgctcgccatgatactcccgatcgaagccctacgcaatgcattagttggcgctttca

SEQ ID NO: 1518 - DNA, 121 bp, synthetic construct
  source 1..121: mol_type = other DNA
atgcgcctggtgctggtggagcaggtgtatcgcgcggtgaagatcaatcgcggtgaaccgtatcacaaatagtggtaaagcggagaacagaactcaatattagtttaaatgacttgaactg

SEQ ID NO: 1519 - DNA, 116 bp, synthetic construct
  source 1..116: mol_type = other DNA
aagagcgggccctctctcatccgctcccgaccggcagccccgaagcctcacgcggcctgcgttcgccacgcgggtgaggcttcagcatcgtgaaccgagaaccccgtcacccgccc

SEQ ID NO: 1520 - DNA, 117 bp, synthetic construct
  source 1..117: mol_type = other DNA
gcaaaggtttgaaaaaagccggttttaccttcgtcggcccgaccatttgttacgccttcatgcaggccagcggcatggtcatggaccacgccaccacctgcgaccgctacgctgagc

SEQ ID NO: 1521 - DNA, 102 bp, synthetic construct
  source 1..102: mol_type = other DNA
ccttgacttggtagcgctcgtccagcgtcttgctcggcgaccagttattggtggtctcgtggtcgtcccactgccatacctggggcacttcggcgttgaagc

SEQ ID NO: 1522 - DNA, 103 bp, synthetic construct
  source 1..103: mol_type = other DNA
gataatatagtacatatcgctgcaaaaagaaaaacggccacaacacccatatttactgggtttgtagccgttttgtcaccttacaactgtcaaagatgggatt

SEQ ID NO: 1523 - DNA, 108 bp, synthetic construct
  source 1..108: mol_type = other DNA
acacaatgacaaccgaaaacagcgcccccaaggtgggctttgtgtccttgggctgccccaaggcactgactgactctgaactcatcctcacgcagctcagcgctgagg

SEQ ID NO: 1524 - DNA, 115 bp, synthetic construct
  source 1..115: mol_type = other DNA
caaaagggttcgtagctcagtgggagagcacctccttgacgcggagggggtcgcaggttcaatccctgccggacccaccagttagaaaataaggtggcctttgcaagaatgcagg

SEQ ID NO: 1525 - DNA, 105 bp, synthetic construct
  source 1..105: mol_type = other DNA
cggagtcggcggcgttcgtcgagaaggcgaacgacggcaatcagacggtgccgacggtgctgttcccggacggttcgacgctgaccaacccttccctggcgcagg

SEQ ID NO: 1526 - DNA, 103 bp, synthetic construct
  source 1..103: mol_type = other DNA
ttatatcaccttgccactgagcttcgggcagatgagtatgaccatagactaagatatccccattacgcaacggaggaagtgcagcaggatgataaaggtgacc

SEQ ID NO: 1527 - DNA, 145 bp, synthetic construct
  source 1..145: mol_type = other DNA
ctagctgtacgccgtatttttggtgcttacataaggtttatttttaaaccctcataagccggaggtcgggagttcaagtctcccccgtgacaccaaaacacactattttaggcactagcagtgatgcttttgttctttctctttc

SEQ ID NO: 1528 - DNA, 106 bp, synthetic construct
  source 1..106: mol_type = other DNA
taaaaccaaatttaatgcaaatgcactcgtcatattgcgtaactgatccaaaaggaacgatagtcattgaatgtggcaagatgcttgaagacaatggatatgagat

SEQ ID NO: 1529 - DNA, 106 bp, synthetic construct
  source 1..106: mol_type = other DNA
ggcacaggccaagcgggcgctcgaaattgctgcggcaggcagtcatagtctcctgatggtcggccctcccggtaccggtaagtccatgctggcggcacgtctcccc

SEQ ID NO: 1530 - DNA, 103 bp, synthetic construct
  source 1..103: mol_type = other DNA
aatgccgggattatcagcgaggaactcctcgcgcgcggcatcaatcgcttcctctagagtggcaaacatagtcatcggcgtctccctgtgatttgacatggtg

SEQ ID NO: 1531 - DNA, 104 bp, synthetic construct
  source 1..104: mol_type = other DNA
gaatgcgctgggccagcatggtcttgccgctgccgggcgggccgatgaacagcaggttgtgcgcgcccgccgccgcgatctcgatggcccgcttggcgtgctcc

SEQ ID NO: 1532 - DNA, 102 bp, synthetic construct
  source 1..102: mol_type = other DNA
ggagctccccggcagccaggaaggacagcgccatgcgcgacatccagaccacgctgatggggaacgtgaccgccgatcccaccgagcaccggcaggaggacg

SEQ ID NO: 1533 - DNA, 109 bp, synthetic construct
  source 1..109: mol_type = other DNA
ctttctaagggagtttttacttctggaatactttattgtggttataacattctttgctgctgcggggttattgttcctttaagtaacgaagtaaaaagtaaaaaaatca

SEQ ID NO: 1534 - DNA, 102 bp, synthetic construct
  source 1..102: mol_type = other DNA
atataatgacaaaatttaatgaaaatgattttgacattataataattgatgaggttcatcgtgcgggagctgacagttatcagaggataatggattatttta

SEQ ID NO: 1535 - DNA, 116 bp, synthetic construct
  source 1..116: mol_type = other DNA
tcaggatcgaacgggcccggatctcgtggaaggtgatgccccggaattcgggggtgtcgaacgtgcgcgtggtcaccgcgtccgcggcgaagagcgcgctgttcccggccgtcgag

SEQ ID NO: 1536 - DNA, 102 bp, synthetic construct
  source 1..102: mol_type = other DNA
ctttagctgatatatctccattataaccttgctttaaattaacacctacttcgctagctacttcatatttgaatttattaagtgcttctcttgcttctggaa

SEQ ID NO: 1537 - DNA, 108 bp, synthetic construct
  source 1..108: mol_type = other DNA
ccggtaaacaggcgcaaggtgtagaagtgcgtcggcgtggtcacaaacagcaggcaggtggacagggtgccccaggtgatcatcatcagcgcaatccagcgccgtgga

SEQ ID NO: 1538 - DNA, 105 bp, synthetic construct
  source 1..105: mol_type = other DNA
aggaaaccgccaagcgcgcgctcgagatcgctgccgcaggcgggcacaatctgctgatgatcggtccaccaggtgcgggcaagagcctgctggcgagctgcctgc

SEQ ID NO: 1539 - DNA, 108 bp, synthetic construct
  source 1..108: mol_type = other DNA
ccccaattggagttgccattgctatgaacttattcgggcacggcatcgccttatctggtgacttcgttattcaaggtgcaccgaaattaacagcagatgctgctggtc

SEQ ID NO: 1540 - DNA, 108 bp, synthetic construct
  source 1..108: mol_type = other DNA
gtgtctcggtaaccatcacatccactttgcccgtagcgacagctttcggcacgtctaagttattttcgaaacgagtaaagctggcatcttgcagatttgcatcggcga

SEQ ID NO: 1541 - DNA, 106 bp, synthetic construct
  source 1..106: mol_type = other DNA
gcttgtaaacattttaaagtgttgtactgttcaccaggagggaaagcacctgtgatgtttctaccaatacagaatttatagatgttcggcacgatgaatgcgacta

SEQ ID NO: 1542 - DNA, 114 bp, synthetic construct
  source 1..114: mol_type = other DNA
ctttcagaaagcgaaaaaaaagccgatgtttctcggcttttagcgttctatggagcagatgaggggaattgaacccccgtatcagccttggcaaggctgtgttctaccattgaa

SEQ ID NO: 1543 - DNA, 102 bp, synthetic construct
  source 1..102: mol_type = other DNA
ctggaaaaggaacaaagctggcaacatatgcggcgcggtgtattgagaacgaaatcctcatgcatttacgcgcactcaaaaaaacaaaaaaagacgtctctc

SEQ ID NO: 1544 - DNA, 102 bp, synthetic construct
  source 1..102: mol_type = other DNA
agtaatagcagtaagcgtatgtagtaaaatcattgtatgatttattgtttcatatgccagatttttttataaaataattttagactatctcttgacaacaaa

SEQ ID NO: 1545 - DNA, 108 bp, synthetic construct
  source 1..108: mol_type = other DNA
agggccaggaaagcgccaagcgggcgctcgaagtggccgcggccggcggccataatcttctgatggtcggtcctccgggctccggcaagtcgatgctggcggccaggc

SEQ ID NO: 1546 - DNA, 103 bp, synthetic construct
  source 1..103: mol_type = other DNA
taatatgatgggatatagatgataacaaataacaaaaaccgcgaaaaccattgattttacgtggttttcacggttccaatttgatgccggcagcgggacttga

SEQ ID NO: 1547 - DNA, 103 bp, synthetic construct
  source 1..103: mol_type = other DNA
catgcaacgcaggctccccgagcacctcgccgagcagccgccagaactggttgcgcggatgcgcgtaatactgcgcggcatccagcgacgcctcgcccggaaa

SEQ ID NO: 1548 - DNA, 102 bp, synthetic construct
  source 1..102: mol_type = other DNA
gaatggccgcccccagcgcatcgcgcacgaccaaggccttgccatgcgcctccgcgaattcgtcggagtaatgcgagccgatccagcgggagtccggctggg

SEQ ID NO: 1549 - DNA, 111 bp, synthetic construct
  source 1..111: mol_type = other DNA
tatatattttttagtttacagcaatatccctccgcactaacagcgagcaacactccacatgccccgtatgcgggaacatatccaccggctgcacttccttcacctcataca

SEQ ID NO: 1550 - DNA, 115 bp, synthetic construct
  source 1..115: mol_type = other DNA
acttgcggtcgctgaccgacgtcggagcggcggcgtcgccgacgatcaggcgcgccgaggcgagattgagaacgggatgcaaggtctcgtcgatcacgacgaagaggccgccgct

SEQ ID NO: 1551 - DNA, 106 bp, synthetic construct
  source 1..106: mol_type = other DNA
tcctgcaaatgccgccgcgacagcgccagaaaacggggcgtcggcccgacatcttcatacagcggatcaccttcctcatccgtcgcaaccacagtcgagcctttca

SEQ ID NO: 1552 - DNA, 103 bp, synthetic construct
  source 1..103: mol_type = other DNA
cgttgccctcgagcccctcctgccgggtctgcagcgcgacccagtcggggtgcgggaacctgatctcgaagacctcctcggccgagatcacccgctccccacc

SEQ ID NO: 1553 - DNA, 103 bp, synthetic construct
  source 1..103: mol_type = other DNA
cggcgggcgtcaccgtggaatgcgatctgggccccggcctgcccaccttcgccgtcgtcggcctcgccgaaacggcggtcaaggaagcccgggaccgggtacg

SEQ ID NO: 1554 - DNA, 110 bp, synthetic construct
  source 1..110: mol_type = other DNA
cgtccacgcctcatgcgtcgcctcgtcggtgggcaccggcacggtgtgaaagtggtcgtagacccacaccgagtcccaggggccgccctccgcgtagtgcacgagatcgc

SEQ ID NO: 1555 - DNA, 102 bp, synthetic construct
  source 1..102: mol_type = other DNA
ccctcgagcgcggcgccctcacgctccgtgggtacgatcgcgttctgcgtgtggcttggacgatggcagatctggcggagctcgatcgccccgggatcgacg

SEQ ID NO: 1556 - DNA, 102 bp, synthetic construct
  source 1..102: mol_type = other DNA
gggcgattgccgggataatacccgctttctttgctttcagaagaatccctaacgttccggtgacggtgagtcccagatacttcgcagtctttttcgctgcat

SEQ ID NO: 1557 - DNA, 110 bp, synthetic construct
  source 1..110: mol_type = other DNA
ggtgccgatggcatcggccatcaggccgaacacgccgagcggcgcgatcagcatcaccttgttgatcatccagacgaaggcatccaccagggtgttgaggccatccacca

SEQ ID NO: 1558 - DNA, 102 bp, synthetic construct
  source 1..102: mol_type = other DNA
ccagtcgactgaccatatcgtgtgcgctgttactatggccggaagacaagcttccatcgtgcccggtgttcatagcctgcagcatatcgagacattccgctc

SEQ ID NO: 1559 - DNA, 106 bp, synthetic construct
  source 1..106: mol_type = other DNA
cgagggaaggcgcgcggccagcatcgatttgccggcgccaggcgggccgttcatcagcaggttgtggccgccggcggccgcgatctccagcgcacgcttggccccc

SEQ ID NO: 1560 - DNA, 150 bp, synthetic construct
  source 1..150: mol_type = other DNA
aaacccgccgtctgtgtggatttaggaatgacaagcgcccaataagggtgtttttattttgcctcaaaggaggtgaaaacgatgtgagaacaggaggatttcaggacatgacacaacccaatgattatgatgttttacaaaaagaaatcg

SEQ ID NO: 1561 - DNA, 105 bp, synthetic construct
  source 1..105: mol_type = other DNA
atcatttgctcaagaccttctggggctggcgcgacagacagctgcctgacggcacggtgatctggacctctccgtccggagatgcctacgtcaccaccccgggca

SEQ ID NO: 1562 - DNA, 102 bp, synthetic construct
  source 1..102: mol_type = other DNA
aggcgagcagccctttgcccgcggcggcgcgcacgccgttgacgttcactgtcgagatgatgtggggcacccgacgaccgtacaatgcacaacatcgacctc

SEQ ID NO: 1563 - DNA, 102 bp, synthetic construct
  source 1..102: mol_type = other DNA
ctgcagttgcagaatctactagtgagtattgtgatactggcgacatgattggtgttaaaggtagagttcaaacaagaattattgaatctcctgatggagtta

SEQ ID NO: 1564 - DNA, 108 bp, synthetic construct
  source 1..108: mol_type = other DNA
aagagaacgagagcagcgagatgacaatcgctatctggtaggcgttgacgatccagatcgaactggcaggcgaggcattcaggtcgctggcgatggtcggcagggcaa

SEQ ID NO: 1565 - DNA, 105 bp, synthetic construct
  source 1..105: mol_type = other DNA
aggtggaacagaccgtgaagctcatccgctccaagggagtgggggtgttcttctgcacccagttgccgacggacgtcccgaatgcggtgctgtcgcagctcggcg

SEQ ID NO: 1566 - DNA, 104 bp, synthetic construct
  source 1..104: mol_type = other DNA
ctacagagggcaacttcaaaaatggttgtatgcaagacatccattggactgacggctcttttggttatttcccatcgtacacactaggagccatgtacgcggca

SEQ ID NO: 1567 - DNA, 106 bp, synthetic construct
  source 1..106: mol_type = other DNA
acgcccgaggcgattgtcctctcctggctgatgacgcaccccgctgcaatccagccggtcattggcactgtaaatcctgggcggatcgccgcttgcagggatgccg

SEQ ID NO: 1568 - DNA, 102 bp, synthetic construct
  source 1..102: mol_type = other DNA
ggtgcaagcctgctctacctgccgccctacagtcctgacttcaatccgatgagaacgccttcgccaaactcaaggcgctgctgcgggcaaaggccgagcgca

SEQ ID NO: 1569 - DNA, 105 bp, synthetic construct
  source 1..105: mol_type = other DNA
aactggctggcacataacgcaaccgaggagtgatgcaaatggctaagattctggtgctttattattctatgtacggacacatcgagaccatggcgcatgccgtcg

SEQ ID NO: 1570 - DNA, 110 bp, synthetic construct
  source 1..110: mol_type = other DNA
gcccgcgtcgagctcgaggtagcggtgcgacggccgcgcgaagcagtagacgcaagcgtgcgtgcagccgcggtacgggttgacggtccacgtgaacggcaccgcggtgc

SEQ ID NO: 1571 - DNA, 102 bp, synthetic construct
  source 1..102: mol_type = other DNA
taaagaatagtaataatatagtctttttcggcggagctggtatcagtactgaatctaatatacctgactttagaggctcaaatggcctatttagcgagaaat

SEQ ID NO: 1572 - DNA, 113 bp, synthetic construct
  source 1..113: mol_type = other DNA
ttctcggcggcatgatctcggcgacgatcctcgcgatcttcttcgttcccgtgttcttcgtcttcgtcatgaagattttcggggatcggaagaaggagaatgagattactgct

SEQ ID NO: 1573 - DNA, 104 bp, synthetic construct
  source 1..104: mol_type = other DNA
ccggcgttcacccccacaaagaacatgctgataatcgcaatgagggtcggaaatcgcccgttgcagggtacaaaattattggtcaagatggcaatcagtcgttc

SEQ ID NO: 1574 - DNA, 106 bp, synthetic construct
  source 1..106: mol_type = other DNA
tagttgtttcgtatatactttcaaaaactttattaaaaggagttccatcaacttttacgcttgaactcccaccttatagaactcctaaaataggtagagttatata

SEQ ID NO: 1575 - DNA, 109 bp, synthetic construct
  source 1..109: mol_type = other DNA
taagatcaagactcccaatgcgaagcttgcgaagataattatttcacagctcggcggtcctgatggtgagctttcggcttcgcttcgctatctcaaccagcgctatgca

SEQ ID NO: 1576 - DNA, 114 bp, synthetic construct
  source 1..114: mol_type = other DNA
cagaggagggttttgtcccagcctcttcttttaaaatcaatttcgccacggattccacatgcgtcgtatgcggaaacatatcaacaggctgcacttccaccgtttgatagccgc

SEQ ID NO: 1577 - DNA, 102 bp, synthetic construct
  source 1..102: mol_type = other DNA
tcacccccggcaggtcgaggtagggcagccacaatggcgagcggttgaagacacacttgtagtggtcgaccagcccggtgtagtcccagtgctcgggctcca

SEQ ID NO: 1578 - DNA, 107 bp, synthetic construct
  source 1..107: mol_type = other DNA
aaaatttattttactatttacattcatttgatttataccactaatttcacattctataggatcttctattgtcgttatattaatgtctttatctttaatgctagaaa

SEQ ID NO: 1579 - DNA, 107 bp, synthetic construct
  source 1..107: mol_type = other DNA
caaaaaaacatatttctgatccgttgaataattctgccgcaaaacgaattaacatgtatttgcgttggatgattcgtgatgataaacaaggtgtcgatttagggctc

SEQ ID NO: 1580 - DNA, 102 bp, synthetic construct
  source 1..102: mol_type = other DNA
aggatctgagcgtcacgcagaccgccgaactgctcggctgccaggccggcacggtggccagtcagacggcccgagggctggcccggctgcggcgactggttc

SEQ ID NO: 1581 - DNA, 102 bp, synthetic construct
  source 1..102: mol_type = other DNA
agccgctgcgccagcatcgattttccagaacctggaggtccgaccatcagcagattgtgaccgccggccgccgccacttccagcgcccgcttggcactctcc

SEQ ID NO: 1582 - DNA, 102 bp, synthetic construct
  source 1..102: mol_type = other DNA
taaagcctgaatcaaaagccgttgtgctcgccatgatggatacgagcggatcgatgggcgtttgggaaaaatatatggcgcgaagttttttcttttggatga

SEQ ID NO: 1583 - DNA, 102 bp, synthetic construct
  source 1..102: mol_type = other DNA
agtgaactgttcagtcatggagattgacgtaaaatggttaagtcccgattaaccacgatcattcactatatttattagcaaatacgcaaagaaaaagccggc

SEQ ID NO: 1584 - DNA, 103 bp, synthetic construct
  source 1..103: mol_type = other DNA
acgaggtcggcggcgctgaccgcagcaacctcgacatgcaggtcgatgcggtcgagcagcgggcccgacaccttcgcctgataatccgccgcgcacttcggtg

SEQ ID NO: 1585 - DNA, 110 bp, synthetic construct
  source 1..110: mol_type = other DNA
ccagcgcggtgcccgccgcgcgctggaagtcgcggccgcgggcggccatcacatgctgatgatcgggccgccgggcgccggcaagtcgatgctggccgcacggctgccgg

SEQ ID NO: 1586 - DNA, 107 bp, synthetic construct
  source 1..107: mol_type = other DNA
gtatttggaaagcccatagtttctaatgtccattcaaacaaatacgataagcaagtattctatgttacgaatgaaaaaggatctgatatgaatatcagatccttttt

SEQ ID NO: 1587 - DNA, 102 bp, synthetic construct
  source 1..102: mol_type = other DNA
gttcttccgcgcgctccgcgtcgggctgcttgcggcgaatgaacatggcgtcgccaaacgagaaaaagcggtacttcatctcgacggcggtcttgtaggcgt

SEQ ID NO: 1588 - DNA, 102 bp, synthetic construct
  source 1..102: mol_type = other DNA
gccccagcccggccgacgccaccgtcgccacgatcaggcccatccacggcagcgcgtacatcgtcagcgtgcccgccgtggtgcagcggaagggggtgggcg

SEQ ID NO: 1589 - DNA, 111 bp, synthetic construct
  source 1..111: mol_type = other DNA
tatgaatttcaggaaggagaaagcctgtgatggaaaacaaagtaacagcagattatctggatgcagaggattttcggcatataacggacttcaatcagctgaaaatattag

SEQ ID NO: 1590 - DNA, 102 bp, synthetic construct
  source 1..102: mol_type = other DNA
gcaccagcagcgccgcgatgcaggatcgcaccgtcggcacctccgcgcccgtcagcagcgtatagccgatccccgccagcgcgcccccggccgccgcgatca

SEQ ID NO: 1591 - DNA, 104 bp, synthetic construct
  source 1..104: mol_type = other DNA
cctggacgtgtgccatcgccgtcgtggtttcaacggtgtggggtatcatttttatatccgaaaaaatggcgacatcaagtctacccgtgaaatagaacgtatcg

SEQ ID NO: 1592 - DNA, 110 bp, synthetic construct
  source 1..110: mol_type = other DNA
ataccattgctttagcaagcattgttttaccacaaccaggttctccatataataaaatattgtgttttcctgctgccgagatttccaaggctcgctttgatgagtattgc

SEQ ID NO: 1593 - DNA, 102 bp, synthetic construct
  source 1..102: mol_type = other DNA
caattgcacccgtggtatcacacagcatgtctttctgtgcatcccaaatatcaccttgtgaaccaaggaacgagataccttcatcaccacctgcaatctccg

SEQ ID NO: 1594 - DNA, 105 bp, synthetic construct
  source 1..105: mol_type = other DNA
cccgcacgcggtcgcgagcttccttcacctcggtatcggggagcccgacgatggtgaaggccggcaagccattggccagatgcacctcgaccgtcaccggcaggg

SEQ ID NO: 1595 - DNA, 106 bp, synthetic construct
  source 1..106: mol_type = other DNA
gccctcgaccgcggcctcctcaccatgcggggctacgaccgcgtcctccggatcgggtggacgctcgcggacctcgacggggcggcgagccccgaccaggaccacc

SEQ ID NO: 1596 - DNA, 122 bp, synthetic construct
  source 1..122: mol_type = other DNA
acgtaaccgattttttccaggattccgcaaagcttttcagagtctctcgcgttcatctgacaaccaaaggttgtaacgcagaacgtcagcggacgaccaagttcttcggattcacgctgtac

SEQ ID NO: 1597 - DNA, 109 bp, synthetic construct
  source 1..109: mol_type = other DNA
aactcgacgacctcatcgaacggatgctccgcagctccggccgccgcgtcgacctctcacagccgttcgtcgacgcgatgctccctgacggatctcgactccacgtcgt

SEQ ID NO: 1598 - DNA, 112 bp, synthetic construct
  source 1..112: mol_type = other DNA
gcgctggccctggcagaagggcgcctatacggcctcttcaacaacggcgcctacggccagcccggtgcgctggaagatctgcccaccgaggcgctgcgcgagcagttcgaga

SEQ ID NO: 1599 - DNA, 104 bp, synthetic construct
  source 1..104: mol_type = other DNA
agaaatcaaataacaacaaaaaacctcatcataaaaatgatgaggtttttgtgagcgcgaaaggattcgaacctttgaccgtctgcttagaaggcagatgctct

SEQ ID NO: 1600 - DNA, 115 bp, synthetic construct
  source 1..115: mol_type = other DNA
gcgaatattttgttgcacgtgcttgttgccaaccagctggaaattgtaagtttaaatccacacctctaatgtttgctttccagccatttggaaaaggaatagtagcaaagccata

SEQ ID NO: 1601 - DNA, 112 bp, synthetic construct
  source 1..112: mol_type = other DNA
gcggccacgcgatcatggacgcggcgctgaacacgggcatcaacttcttcgacacggcgaacgtgtacggctggggcgagaacaagggccgcaccgagagcatcatcggcaa

SEQ ID NO: 1602 - DNA, 102 bp, synthetic construct
  source 1..102: mol_type = other DNA
agacggccaagcgggcgctggaggtggcggccgccggcggccacaacctgctgatggtcggtccgcccggctctggaaaatcgatgctggcgcagcggctgc

SEQ ID NO: 1603 - DNA, 101 bp, synthetic construct
  source 1..101: mol_type = other DNA
acaaggcaagcgtgctctagaaattgcggcggctggaaaccacaacctactttttcttggtcctcctggtacaggaaaaaccatgctggcatcgcgtttat

SEQ ID NO: 1604 - DNA, 120 bp, synthetic construct
  source 1..120: mol_type = other DNA
gatatgtcgcccgcgccttttcttccgcagcaatatcttcatacaaatcggcaataggatctccttttgcctggatataagtggcagtgaatggagcgcctgctgcattatggtagaaca

SEQ ID NO: 1605 - DNA, 106 bp, synthetic construct
  source 1..106: mol_type = other DNA
ctcttccactgataggtgtgattacctttagttgggcaattgctttctttgaatattcttgtcagatacctgcgaatcgtatcggatttgaggggaatggtggccc

SEQ ID NO: 1606 - DNA, 102 bp, synthetic construct
  source 1..102: mol_type = other DNA
cacagggctggctcacgcatgcgtcaaatctcaagtgctactgccgaactcaccatttggtcaagaccttttggggatggcgcgaagagcagttgcccgacg

SEQ ID NO: 1607 - DNA, 113 bp, synthetic construct
  source 1..113: mol_type = other DNA
cggcggcgactcgctgaacttcagcgccggcgggccgggcaatgcggtgctgatcaagtccggccatccctggctggatcgcatcagcgaccacacggcgctggagcggatgc

SEQ ID NO: 1608 - DNA, 106 bp, synthetic construct
  source 1..106: mol_type = other DNA
gcaaaaacacgccttatagagcataacctgcgtctggtcgcacatatcatcaagaaatattacagcgcctttaaagaccaggacgatcttatctccattggcacga

SEQ ID NO: 1609 - DNA, 103 bp, synthetic construct
  source 1..103: mol_type = other DNA
caggcgaaagatcccagtacgcgtgcgatggccgcgcaaagcagtagatgcagccatgttcgcaaccgcggtaagggttgaccgagcgatcgaaaccgacgtc

SEQ ID NO: 1610 - DNA, 103 bp, synthetic construct
  source 1..103: mol_type = other DNA
ataatcgagaagccaacatggttttgccagtacctggagggccaaggaaaagcaggttgtgattgccagctgccgcaatttctaaagcgcgctttccttgctg

SEQ ID NO: 1611 - DNA, 102 bp, synthetic construct
  source 1..102: mol_type = other DNA
tgcgctcttggatatcgccaccaatgtgatagggtaagccacagtttgcaaatgacacaaatggaccgcgttcaaacataatgatttctgcgtcttcactaa

SEQ ID NO: 1612 - DNA, 111 bp, synthetic construct
  source 1..111: mol_type = other DNA
gaaaacaaaaatagaattatctttacacgaacctattgggacagacaaggaaggcaatgaaataaacctattagatattttaggttcagatgtagatgagataattgatga

SEQ ID NO: 1613 - DNA, 112 bp, synthetic construct
  source 1..112: mol_type = other DNA
gtggacttaaaatcccgtgggaagaaattcccgtaccggttcgaccccggtcatcggtaccaaatgacttagaactttgttctaagtcattttttgttgaaaaaatataata

SEQ ID NO: 1614 - DNA, 110 bp, synthetic construct
  source 1..110: mol_type = other DNA
agtgccttgcgtcttataggttattttcattttattcttcctcttcagatgcaggtttcatgtttgtataaacggtctgaacatcatcaaattcttccagacgctctacc

SEQ ID NO: 1615 - DNA, 102 bp, synthetic construct
  source 1..102: mol_type = other DNA
aaaaacacgagggcgatcatgtgctctatctggagctcggcgtcggcggcaacacccctgtcatcatcaaatatccgttctggcagatgacgctcgcaaaca

SEQ ID NO: 1616 - DNA, 106 bp, synthetic construct
  source 1..106: mol_type = other DNA
gcgcaggttcgcgcgctggtgcgccggcgtgctttgagaagtaggggaaatggtgggcggcacagggatcgaacctgtgacccctcccgtgtgaagggagtgctct

SEQ ID NO: 1617 - DNA, 113 bp, synthetic construct
  source 1..113: mol_type = other DNA
ccacctcatcaagcttcgcgcctcgcagatcaacggctgcgcctattgcgtcgacatgcatgtgaaggaggcgcggcacgatggcctcagcgagcagtggatcaatctgatgt

SEQ ID NO: 1618 - DNA, 104 bp, synthetic construct
  source 1..104: mol_type = other DNA
ctatgccaaaacaggtatacagacttacatgggaccattctatagcagctttaagatgcgtgagggacaagattaccagactcaggcctggctcaaggctgtga

SEQ ID NO: 1619 - DNA, 114 bp, synthetic construct
  source 1..114: mol_type = other DNA
agaccctcaccaccagcggcctccccctcgtccgcgacgccggcttcaccgaggtcgcccccggctccagcacggtggtcgcggaccaccgtcccctgcacacctgaacccctg

SEQ ID NO: 1620 - DNA, 104 bp, synthetic construct
  source 1..104: mol_type = other DNA
catttggtattcgcaacgtcaaaatatatgtagatgaatttcctttaaccgatgcaggaggtaatacctacctgaatttgatagatcctgcttccatatctacg

SEQ ID NO: 1621 - DNA, 102 bp, synthetic construct
  source 1..102: mol_type = other DNA
aaaataaagagattaaagaaaaatatacccaacctccgaaacactttactgaagatactctcttaaagtctatggagattgcaggaaatgaagccttggaaa

SEQ ID NO: 1622 - DNA, 115 bp, synthetic construct
  source 1..115: mol_type = other DNA
gcctgtggctgacggtgagctgggcctcggacccgtactactacggcaacgacctgccgtacatgatggcctggctgccgttcgtgctgggcggggcgtcggtggtgtcggtcga

SEQ ID NO: 1623 - DNA, 110 bp, synthetic construct
  source 1..110: mol_type = other DNA
cagcaagagcgcgccacagacaatcgtgacgttggcgcccgacaccgcggtcagatgtgtcagaccagcagtgcggaactgcgccgccgtcgtcgcggtcaccgccgagg

SEQ ID NO: 1624 - DNA, 100 bp, synthetic construct
  source 1..100: mol_type = other DNA
agctatataaattcattttacaaataaaattaaaaattcaaaaccgcctgaaagggcggttttttgtcggaattttagtttttttacagctttgtacaat

SEQ ID NO: 1625 - DNA, 115 bp, synthetic construct
  source 1..115: mol_type = other DNA
ctaagtattattcttttcaatttttctaactaaaaactccaaatgaggatctactccaccgtgacggacttggctaagtttcttggttgatcgatgtctgtgcctctgatcaaag

SEQ ID NO: 1626 - DNA, 109 bp, synthetic construct
  source 1..109: mol_type = other DNA
aaaagccacatcggaccccaaccacagatgaccaccctctacggcataaaaaactgcgacaccatcaaaaaagcccgcaaatggctcgatgacaacagtatcggctacc

SEQ ID NO: 1627 - DNA, 108 bp, synthetic construct
  source 1..108: mol_type = other DNA
atgagtgtatagcagacgatttagacatagactgacggcgagtgattagctgataaatttcaataaaacaattaaaagtcttacttagaactcttaaaggtctaagta

SEQ ID NO: 1628 - DNA, 103 bp, synthetic construct
  source 1..103: mol_type = other DNA
cgctgtcgccatcaaaaccgcaggggcatggattcatcgccgctattaattgaaatcgagccgggaaggttaattgttgggttgctctggagatggttacctc

SEQ ID NO: 1629 - DNA, 108 bp, synthetic construct
  source 1..108: mol_type = other DNA
cgccaggtttaggtcctggtgtcctcggacgtgggggttcaagtccccccgggcgcacatgcaggtcagagcctgtcttcgggacaggcacccttcctgggccacttg

SEQ ID NO: 1630 - DNA, 110 bp, synthetic construct
  source 1..110: mol_type = other DNA
ttgcaggcgtagaagttctttgcgttcagcttatcctgtgtgatgcgcaacgcttccccgaatcgctggaaatgcacaagctcccgctggcgcaagaagcgaatggcatc

SEQ ID NO: 1631 - DNA, 109 bp, synthetic construct
  source 1..109: mol_type = other DNA
cgaggagttgaaccgcagccatgcgcgtcgagatctggtccgacatcgcctgtccctggtgctatgtaggaaaggcgcggttcgacaaggcgctcgccgccttcccgca

SEQ ID NO: 1632 - DNA, 104 bp, synthetic construct
  source 1..104: mol_type = other DNA
gcacaattgatcgcggctgattccacgacataacaaaaaaggcggacgcctccgggcgtccgccttttttggggcaagcccaacaggcccggcgggggagataa

SEQ ID NO: 1633 - DNA, 104 bp, synthetic construct
  source 1..104: mol_type = other DNA
gtacggcgacgagaccggcgccgcgacggcggagtacgccatcgcgacgatggccgccgtcgcgttcgccggcctccttgtgatcatcatgcgcagcgatgagg

SEQ ID NO: 1634 - DNA, 102 bp, synthetic construct
  source 1..102: mol_type = other DNA
ggcgactgcttccgaacctgggccgccggatggtcggcgcctggtgcttcgtcgatcactacggccccgacgacatcgccgacgagcccggcatgcaggtgc

SEQ ID NO: 1635 - DNA, 107 bp, synthetic construct
  source 1..107: mol_type = other DNA
gcaggaagaaaaacgggtgctggtggtggatatcggcggtggtacgactgactgttcattgctgctgatggggccgcagtggcgttcgcgtctcgatcgtgaagcca

SEQ ID NO: 1636 - DNA, 102 bp, synthetic construct
  source 1..102: mol_type = other DNA
tagtcgagaacttccgagccgcgggattgacgcatctgaccgcggtgtcgggtgcgaacttctcgatcctgatcggtgccgtgctgttggtgttgcgcggca

SEQ ID NO: 1637 - DNA, 111 bp, synthetic construct
  source 1..111: mol_type = other DNA
accgcagcaacgtgtaatgaattacagatcaccttaccgcaggaggcaacatgattgacctgtattacgcgcctactcccaatggtcacaagatcaccttgtttttggaag

SEQ ID NO: 1638 - DNA, 112 bp, synthetic construct
  source 1..112: mol_type = other DNA
agaaaggtccttggtgagctgataaacgatggcgcataccatttccatgtgagcgagttcttctgttcctatatcggttagcgttcctgttacttccttatacggcatagta

SEQ ID NO: 1639 - DNA, 114 bp, synthetic construct
  source 1..114: mol_type = other DNA
gcagcggaaccgcaactttgactgcgctgggacaaatcactgcgatttgggtcggcggaggcaccttgattccatgggcactgatcccagccgctgcaatatgtaatgtcagcc

SEQ ID NO: 1640 - DNA, 102 bp, synthetic construct
  source 1..102: mol_type = other DNA
gctgtgacagtcgccgcaattccgtcgtctgccctcgcagaaatgtgccgcgggtaatagttctttcatatacccgccatcgcgcccttgcctgaggcgaca

SEQ ID NO: 1641 - DNA, 102 bp, synthetic construct
  source 1..102: mol_type = other DNA
agcgcgagctgatggagatcgccggcaaacgcgaaatctccatgctggtgcccatcatcttcggcgtgctgccgctgaccatcgtcttcgcgatcttcccgg

SEQ ID NO: 1642 - DNA, 110 bp, synthetic construct
  source 1..110: mol_type = other DNA
ttcaacttcatccactacggactcggaatcattacttattaagtctatcaatgttatttcattaccctctttatcaacacctatagggtcttgcagtgaaacttcattct

SEQ ID NO: 1643 - DNA, 149 bp, synthetic construct
  source 1..149: mol_type = other DNA
aaaaagacactttctcattgcgagaaagtgtcttgaaacattgtaattgattcgtaagcgaacacgttcgcaacgactccaagtaattaacgttttgagaattgtgaagctttacgagcttttttaagacctggttttttacgttcaac

SEQ ID NO: 1644 - DNA, 108 bp, synthetic construct
  source 1..108: mol_type = other DNA
tatattcgatgttttcggcttctagccacttcttcatcttcttgatggtatcgcagtttttgatgccgtaagcaattgtactcatagttattctggctgacttgtttt

SEQ ID NO: 1645 - DNA, 110 bp, synthetic construct
  source 1..110: mol_type = other DNA
gcgattgcacgagctttaattacaaagccggcgattgtccttgctgacgaaccgactggaaatctcgacagcaagaccagtgcagatgtgttagggcttttgaaacgtac

SEQ ID NO: 1646 - DNA, 117 bp, synthetic construct
  source 1..117: mol_type = other DNA
acccggagcaggaccgcaccgatgcccagcgcccgatcatgatcctggccttcgagggctggaacgacgcgggcgacgcggccagccaggcgatcgaacacctccagctcgcctggg

SEQ ID NO: 1647 - DNA, 106 bp, synthetic construct
  source 1..106: mol_type = other DNA
ccgggcggcttcgtcaaccgccgagtgcctgttcccaaaggctttttggcgatcactcctgatgaaaaccgctcacgaatcgtttgctggctcttcttatttccgc

SEQ ID NO: 1648 - DNA, 107 bp, synthetic construct
  source 1..107: mol_type = other DNA
gaagagattccggaaccttgatggtttctttttatgttgtacggacgattaaatgaatttagttaagacagtaccggctgcaattttgctgaccggaagtgcgctat

SEQ ID NO: 1649 - DNA, 106 bp, synthetic construct
  source 1..106: mol_type = other DNA
cgccgggaccgaagacatctctcaatgcgctctcaacctattgatatggttggtgggcccggcaggactcgaacctgcaaccagaccgttatgagcggtcggctct

SEQ ID NO: 1650 - DNA, 102 bp, synthetic construct
  source 1..102: mol_type = other DNA
ccagcggctggcgcagcgagtccagggcccgtccgctgaactcgggggcctcgtccaggaagagaatcccgcggtgggccagcgagacggcccccggcctcg

SEQ ID NO: 1651 - DNA, 104 bp, synthetic construct
  source 1..104: mol_type = other DNA
ccatgtttacataccggtccactacgccgggatacttgggctccaccacatggggagcggtcccgtccaccagggctacccctagctgggggagcagcagcgcg

SEQ ID NO: 1652 - DNA, 117 bp, synthetic construct
  source 1..117: mol_type = other DNA
gcttaccaaaacttagattttgtgtcttatgatgtattaggagacgttgtatgcggtggttttgctatgcctattcgtgaaggcaaagcacaagaaatttacattgttacctctggt

SEQ ID NO: 1653 - DNA, 116 bp, synthetic construct
  source 1..116: mol_type = other DNA
gacgagcaagactaaggatcttgtgttcattgcgaacgtgtgggttcaagtcccatcttccgcattggttgttatagaacgtatataaaaaccccgaagcccttattattgggttt

SEQ ID NO: 1654 - DNA, 111 bp, synthetic construct
  source 1..111: mol_type = other DNA
atttttgaagggagaagatttatatgaaggttattattgttggcggaggttggtctggatgcgcagcagcaatttcaagtaaaaaggctggagcagatgttactatcatag

SEQ ID NO: 1655 - DNA, 107 bp, synthetic construct
  source 1..107: mol_type = other DNA
agcatctaggccggcagctttcatctgctcaggggttgcatctttcgttaacttataaaccattgttgcaatcatttcaaggtgtgcaaattcttctgtaccgatat

SEQ ID NO: 1656 - DNA, 106 bp, synthetic construct
  source 1..106: mol_type = other DNA
accgctgagataaataccgcatcgatgcagcgagctccccgtccgggccaccaaattgtgaaatgatcactttggcaatctgtgggttcgtttgtgtaatctttac

SEQ ID NO: 1657 - DNA, 115 bp, synthetic construct
  source 1..115: mol_type = other DNA
ctccgttagggaacaggcggcctatgccgccgctaacttattggtgagcgattatgtcgatgagtgaagagtatcaacccatcaattgtgatgactacgataatctggaactcgc

SEQ ID NO: 1658 - DNA, 111 bp, synthetic construct
  source 1..111: mol_type = other DNA
cgtactggttccatcccatagctgatacatagccggattctacagctatgatcggtgttccagtctgccccatcatgtcatgtcccaggtgctctctcttatacccatagc

SEQ ID NO: 1659 - DNA, 108 bp, synthetic construct
  source 1..108: mol_type = other DNA
aaataataaaaaatagtaataacatagttttctttggaggagctggcgtgtcaactgagtctggaattcctgactttagaagtgctaatggcttatttaatgaaaagc

SEQ ID NO: 1660 - DNA, 109 bp, synthetic construct
  source 1..109: mol_type = other DNA
cgtgcggccattcctcgtcggcgtcggatcgcgtgaggtcggcacaccgcaggcagctcgtgctgcccggcaggaccagcggccccaccaccccgcgcccgtcccgcag

SEQ ID NO: 1661 - DNA, 100 bp, synthetic construct
  source 1..100: mol_type = other DNA
agcagaaaaatcacgcctcgacgcgacgaggctgttcactgagatcatggcgtgatccgccgccgcagcaaacagaactcgttcccctcaggatcgacca

SEQ ID NO: 1662 - DNA, 104 bp, synthetic construct
  source 1..104: mol_type = other DNA
ccacaaccgggagaaatatcgctcgcccataatggcgttctgttctgcgatgaacttccggagttcaataaaaccactctggaagtactccgccagccattgga

SEQ ID NO: 1663 - DNA, 105 bp, synthetic construct
  source 1..105: mol_type = other DNA
gcccttcttccggttccagcagtcctgaaataatggacaggagggtggacttcccacacccggatgggccgaccagagcgacaaattcgccggcggcaatagaaa

SEQ ID NO: 1664 - DNA, 110 bp, synthetic construct
  source 1..110: mol_type = other DNA
attccctcatcacggtaggtcggcacggtacattctcaccggcgggcagcaccgcacgcagataacgcgcccaggaggatgggaatgtccgaggatccgacacctcctga

SEQ ID NO: 1665 - DNA, 102 bp, synthetic construct
  source 1..102: mol_type = other DNA
cgccttggctcggtccggcggggcaggccgccttttaccggcagatcgcacaggccgatcagcggtacaccgacgaaatcgagccgcgctaccgcgacgtca

SEQ ID NO: 1666 - DNA, 109 bp, synthetic construct
  source 1..109: mol_type = other DNA
acacttagtgaaaaccaagttcggttggcacgtgttgaaagtgctataccgaacctaacgccctatcttgctattgattgaatgctttattctcggccggtaacaagtg

SEQ ID NO: 1667 - DNA, 108 bp, synthetic construct
  source 1..108: mol_type = other DNA
gaagatcgcgcagcgctcgccgtcgagcaactgcgcgcagcgcacgccggccggcttgccgttcggcatgccgggaatcgggctcgaaatcgacggcgcgatgcagca

SEQ ID NO: 1668 - DNA, 102 bp, synthetic construct
  source 1..102: mol_type = other DNA
agggcagtctctcgaccggcactgtcggcgtgctggccggcggcctcgacgttccctacccgcccgaaaatgccggcctgtgcgacgacatcgccgagcgcg

SEQ ID NO: 1669 - DNA, 115 bp, synthetic construct
  source 1..115: mol_type = other DNA
gacgctgtcagcggaacaataggtcgcttcgccggccaggctcacacgttgaaacggaactccacaacgtccccgtcggccatcacgtagtccttgccctccatgcgcaccttgc

SEQ ID NO: 1670 - DNA, 100 bp, synthetic construct
  source 1..100: mol_type = other DNA
atcgaatgagattcgatccatgatggcatctgtgagagggttgtccttactgcaaattccggctcatctgactacgcattccgctaagagctgatcagtc

SEQ ID NO: 1671 - DNA, 104 bp, synthetic construct
  source 1..104: mol_type = other DNA
acacgaggtcacggcgagcagccatgcaccgatcaacgctgttgtcgcgagccccctcaccacctcacccgaaactctcgctgcgcgggacggactgcggacgc

SEQ ID NO: 1672 - DNA, 109 bp, synthetic construct
  source 1..109: mol_type = other DNA
cattattttttgttattccaaagcccaaaattaactgaactcttgaaatcttggcacgcccagggggaatcgaacccccgttaccgccgtgaaagggcgatgtcctaac

SEQ ID NO: 1673 - DNA, 103 bp, synthetic construct
  source 1..103: mol_type = other DNA
agcaccagcagcgcggcgatgcaggaccgcagcgtcggcacctccgccccggtcagcagcgtataaccgatccccgccagcgccccgccccctgccgcgatca

SEQ ID NO: 1674 - DNA, 104 bp, synthetic construct
  source 1..104: mol_type = other DNA
actcctccacccccggccagccgggagtttgcggcgttgacgacggcgtccaccggtagctccgtgatgtcacccaggaaggcctcgatgaagggtgggctcat

SEQ ID NO: 1675 - DNA, 104 bp, synthetic construct
  source 1..104: mol_type = other DNA
gaatctggtcacccgcatgctggggcacctgtctggcgccatgaccaacgtcttcctgctgatgatgaccgtggtgtttatgctgttcgaagtgcagctgctgc

SEQ ID NO: 1676 - DNA, 111 bp, synthetic construct
  source 1..111: mol_type = other DNA
ctacccccaccagcaccgcctcagacggattcacttcccgcccctgctccagccaggtgtaccaggtgacgccaacgtccgccagcatcgccacctcttcgcgacgcaagc

SEQ ID NO: 1677 - DNA, 103 bp, synthetic construct
  source 1..103: mol_type = other DNA
cttccagttgcggcatgccgagcttgcgggtgatctgctcaagcaggggcagctcgctctggtagctgccgaacttgtgcttcttgtagcccagggcgtcggc

SEQ ID NO: 1678 - DNA, 113 bp, synthetic construct
  source 1..113: mol_type = other DNA
accgcagcaacgtgtaatgaattacagatcaccttaccgcaggaggcaacatgattgacctgtattacgcgcctactcccaatggtcacaagatcaccttgtttttggaagag

SEQ ID NO: 1679 - DNA, 106 bp, synthetic construct
  source 1..106: mol_type = other DNA
cgactcaaaatcgagttccgcaaggagtgctggttcgattccggccaggggcaccagccttcgctgcttcgcagctacggctgggcgagccaggcgcaagtctatc

SEQ ID NO: 1680 - DNA, 105 bp, synthetic construct
  source 1..105: mol_type = other DNA
tgcttgccgccctcgtccttcctttcacgtacggcaagggccagtcgtatccgtaaagtgacatacccatcaggattttcttcgggtcgattgcgcccgtggcgt

SEQ ID NO: 1681 - DNA, 102 bp, synthetic construct
  source 1..102: mol_type = other DNA
cgacagaaggcaactttaaaaatggttgtatgcaagacattcactggactgatggcgcgtttggatacttcccttcctacactctaggcgcaatgtacgcgg

SEQ ID NO: 1682 - DNA, 111 bp, synthetic construct
  source 1..111: mol_type = other DNA
ccactatggtaaaaactttcggttgccctcgctcaagaaatgcccatatagaaagaaaaaagagtaagtgcgactatattcttcctacttgtcctacagatgcggagatac

SEQ ID NO: 1683 - DNA, 102 bp, synthetic construct
  source 1..102: mol_type = other DNA
agattgagagatgaattaggacagcctcttcaaaattgatgttttcttaactcataaccatccccccatcaacttgaattacctgaccggttatgtaagaag

SEQ ID NO: 1684 - DNA, 108 bp, synthetic construct
  source 1..108: mol_type = other DNA
ctcgaggggttcccgcagggattcgagcgacttgacactcatctcggcgcactcgtcgaggaacagcactcctcgatgcgccttggacgccgcgcccggccgggcgaa

SEQ ID NO: 1685 - DNA, 105 bp, synthetic construct
  source 1..105: mol_type = other DNA
cgacatagccggtctccacgtcctcgacgaccaggccaagctcggccggctgctcggtcgagcggggcttgcggcgcccggcggcgaggacatcagtgccatagc

SEQ ID NO: 1686 - DNA, 111 bp, synthetic construct
  source 1..111: mol_type = other DNA
aatcagcgtcgaggccaagcccgacgctgtttactgtggggtaactgtacgtgtccgaggggggacttgaacccccacgccctatacgggcactagcacctcaagctagcg

SEQ ID NO: 1687 - DNA, 114 bp, synthetic construct
  source 1..114: mol_type = other DNA
cagagatacacaatgccatacagggaagtggcgggaatattgactgatataggcacggaagaacttgcacacctcgagatggtcagcacaatagttcaccagcttacacgcaat

SEQ ID NO: 1688 - DNA, 102 bp, synthetic construct
  source 1..102: mol_type = other DNA
ctcttttttgtgtcgcttgtttgttttagaaatcaaactgcaagtagacactgttgtagttactgccgcccttgatacgcccgtattgtgacgatttttcaa

SEQ ID NO: 1689 - DNA, 102 bp, synthetic construct
  source 1..102: mol_type = other DNA
gttttttagggcatccaacgatgtggtcatccaccatgccaacggcttgcataaaggcataacagatggtttcaccgacaaacttaaagcctttctttttga

SEQ ID NO: 1690 - DNA, 102 bp, synthetic construct
  source 1..102: mol_type = other DNA
taagcgaagatgccgaaatcatcatgtttgaacgtggcccgtttgtttcatttgccaactgtggcttgccttatcacatcggcggcgatatccaagaacgca

SEQ ID NO: 1691 - DNA, 105 bp, synthetic construct; identical to SEQ ID NO: 1257
  source 1..105: mol_type = other DNA

SEQ ID NO: 1692 - DNA, 115 bp, synthetic construct
  source 1..115: mol_type = other DNA
attttatgcaaccacttgaatcattaaagccacgtatttccgttgccccaatgatggattggacaacaaaagattatcgtttctttgctcgtttatttaatccaaatgtagtgct

SEQ ID NO: 1693 - DNA, 102 bp, synthetic construct
  source 1..102: mol_type = other DNA
aacattgccaagtaagcggacattaaaataagaggaaagggcctctgccgaatggcagaggcccttttgttcaccgctggggcaggtattcggctgggtcta

SEQ ID NO: 1694 - DNA, 105 bp, synthetic construct
  source 1..105: mol_type = other DNA
tgaagcccaacttaatgcaaatgcacagcagctacgttgtaaccgacccgaaaggaacggttttagtcgagtgcgggaagctcttacagcggggcggctaccgga

SEQ ID NO: 1695 - DNA, 103 bp, synthetic construct
  source 1..103: mol_type = other DNA
aagcgccaagcgggcgctggaggtggcggcggccggcaaccacaatctgctgatggtcggcccgcccggatcgggaaagtcgatgctggccgcgcgtctgccc

SEQ ID NO: 1696 - DNA, 102 bp, synthetic construct
  source 1..102: mol_type = other DNA
ctaggggttggcgaagtacttcaagtacacttctattaaattccggcaactcgtctagaaagagcaaaccgttgtgggccagactgatttctcccggttggg

SEQ ID NO: 1697 - DNA, 106 bp, synthetic construct
  source 1..106: mol_type = other DNA
cgacggcctcggtggcccgtttgacgacctcgaacacctcgtcccagtcaccctcgatcgtggtgaacatcgagtcggtgtggttcggcaggcccgattcccgcac

SEQ ID NO: 1698 - DNA, 106 bp, synthetic construct
  source 1..106: mol_type = other DNA
atcagtcccgccaggcgctccggcagctgcagctggtggctgatatacagcggcatgttgatcaggtacatgctgttacaggtccacatcagggtggcgcaggcca

SEQ ID NO: 1699 - DNA, 108 bp, synthetic construct
  source 1..108: mol_type = other DNA
gcgcctcccgctgcgtcgagtagcgaaaccccacgccctgaaccgagccatatacccatgccattgtgcagattgtcgccatcgttacactccttttttggcctgccc

SEQ ID NO: 1700 - DNA, 105 bp, synthetic construct
  source 1..105: mol_type = other DNA
gtttggagatcattgaagggctgagaggtcatacctcaggctatgcggttcctacctttgtcgttgacgcaccaggcggaggaggtaaaatcgccctgcagccaa

SEQ ID NO: 1701 - DNA, 102 bp, synthetic construct
  source 1..102: mol_type = other DNA
atatggtggacgtcaatactattattggtgatccggttgaaacaccggatggaagcgttatcttacccatttcaaaagtaggctttggttttgcttctggag

SEQ ID NO: 1702 - DNA, 117 bp, synthetic construct
  source 1..117: mol_type = other DNA
ctgacggcatgagcgaaacctccgccgagccgtccgtcccccgggtccgcgtcctcctcgccgaggaccagtccatggtccgcgaggcgctcgcggcgctgctggacctggagggcg

SEQ ID NO: 1703 - DNA, 111 bp, synthetic construct
  source 1..111: mol_type = other DNA
aggcggaggcagaaaacaaaccgcttatggtgtccattgggtattcaacgtgccattggtgtcatgtaatggagcaggaaagctttgaaaatgcagaagtggcagcagtgt

SEQ ID NO: 1704 - DNA, 107 bp, synthetic construct
  source 1..107: mol_type = other DNA
cattttgtaaagctacatacaagtctggaaaattcatgccgcccagaagtttaccaatcggaggcatgataatatcgtttaccacagaagtgacaatcttgccaaac

SEQ ID NO: 1705 - DNA, 104 bp, synthetic construct
  source 1..104: mol_type = other DNA
cggctgcgcaccaaggtcggacaaaagcgtagaaagcgtgtcgtaagcggcgggtgccatcgccgcccccatgttattcgcgtccttaacgcccatctccacca

SEQ ID NO: 1706 - DNA, 105 bp, synthetic construct
  source 1..105: mol_type = other DNA
agattggggaaattgtggattatgcgctgattatgacctatgagtggggctacacatacggaccgcctatggcggtttcgccaatcaatcaggtgcggaaagtgc

SEQ ID NO: 1707 - DNA, 108 bp, synthetic construct
  source 1..108: mol_type = other DNA
gggcgacgggcaagagtttgtgacaacttatctcgcaacgtcgtgacgtgcgtggctgggggacctggattcgaaccaagattaacggagtcagagtccgctgttcta

SEQ ID NO: 1708 - DNA, 108 bp, synthetic construct
  source 1..108: mol_type = other DNA
agcgtgcgacggtcgggctgcagtccgccgccggttacgaggagggcaaggccctgccggtcagctggtgacctcttcggctccgcgcccttcccactcgcgccgcag

SEQ ID NO: 1709 - DNA, 105 bp, synthetic construct
  source 1..105: mol_type = other DNA
ccattgcaatcacgcacaggattacgatggacatcagtacccacgtcagcttaaacgtctgggaaccgtagatgatcaggtatccaagtccctggcgggcgccaa

SEQ ID NO: 1710 - DNA, 112 bp, synthetic construct
  source 1..112: mol_type = other DNA
cgcctagtattagtagaacagatttaccgagcttttcgtattattcgaaatgaaccttatcataaatagatcgtgtggatattttttcattaaaagctgaggcagaaggaaa

SEQ ID NO: 1711 - DNA, 104 bp, synthetic construct
  source 1..104: mol_type = other DNA
ggctgcccgagcgcatgagcgccagcagcaagccggcgaaggccgcggccgccaaggtgccgatagcgtactcagcggtagccatgccctcctccttggtgacc

SEQ ID NO: 1712 - DNA, 102 bp, synthetic construct
  source 1..102: mol_type = other DNA
aagacatgaaccgaaaatatcgtgaaacgtctttaggtggattagccgtcattcatgtcgctcctccgtgtgaataacgctttttcataagcgctaaaaaga

SEQ ID NO: 1713 - DNA, 106 bp, synthetic construct
  source 1..106: mol_type = other DNA
gtggatataagacagtggaggtaactccggtggatatgttcccgcatacgacacatatcgaatcagtcgcattgcttctgagaactgatacagatgtttagattca

SEQ ID NO: 1714 - DNA, 111 bp, synthetic construct
  source 1..111: mol_type = other DNA
gctcaatcacttttgctaaaccatcagcagacgtttgggtgtcgataagggcattaggcccacccatttcagtacgtacccagcccggatgaagtgccaagactgtgaagc

SEQ ID NO: 1715 - DNA, 107 bp, synthetic construct; identical to SEQ ID NO: 1234
  source 1..107: mol_type = other DNA

SEQ ID NO: 1716 - DNA, 102 bp, synthetic construct
  source 1..102: mol_type = other DNA
taacacaatctacacaggatttcgttgcactgatgggcggtactggcgcgactttactcgttccttatttatttatatttctttgtaaatcaaaagaattaa

SEQ ID NO: 1717 - DNA, 111 bp, synthetic construct
  source 1..111: mol_type = other DNA
tccggtgtcggtcagcgcgatccgaaccagcaacagcggcatgggctttcacgggttctaccggcccaccgaatgagcatcccgtcccacgatcggagtgacatgaccgaa

SEQ ID NO: 1718 - DNA, 113 bp, synthetic construct
  source 1..113: mol_type = other DNA
acaccaccgccaacgattaacaatgacgatggtacactctcaagagacatggcatggctactatttaaaatccattttccatcaaacggagcgaatggtaattctgtaggttc

SEQ ID NO: 1719 - DNA, 112 bp, synthetic construct
  source 1..112: mol_type = other DNA
gattagaacggggaataacacaagcttttattgcaagaaaaatgggttataagtacacatcaggttatagtaatatcgaaaaaggaagcgtacggttatcacataaaaatgc

SEQ ID NO: 1720 - DNA, 107 bp, synthetic construct
  source 1..107: mol_type = other DNA
gccttccgagcggagctgggtgaggatgcgctcggaatcgacgagggccttcgggcagccaaggctgacgaagccgactttggggttcagctgggacatggaatcgc

SEQ ID NO: 1721 - DNA, 103 bp, synthetic construct
  source 1..103: mol_type = other DNA
aagatatacttaaactcgtgccatatgcccgcacagaactatctccgcagttctgtgcgtttttttatttatctcataaagcctgccggccatttaacattga

SEQ ID NO: 1722 - DNA, 104 bp, synthetic construct
  source 1..104: mol_type = other DNA
agatgcaggacgtttggataaaactgcaaccttatctgacatagaaatagcttctgatatatcatgggtaactaatatagtagatttattttcattttttatta

SEQ ID NO: 1723 - DNA, 102 bp, synthetic construct
  source 1..102: mol_type = other DNA
aaaagcatgtgagtgatccctttaaaaattctgcagcaaaacgaatcaatatgtatttacggtggatggtgagacaggataataatggtgtagattttggga

SEQ ID NO: 1724 - DNA, 104 bp, synthetic construct
  source 1..104: mol_type = other DNA
agaacccccggaaccccatgtccatgttcgtggtgcggatggggttgacctgcacgggatcgccggcttcgaccatctggccgtcgccgacgaccatggcgacg

SEQ ID NO: 1725 - DNA, 105 bp, synthetic construct
  source 1..105: mol_type = other DNA
caaagcttgacgatacatatttgattggcaaaatcaagccaaaagctcatccttttgtggagtatttaaagttcttaaagcagtttgaagacgaaaatacagttg

SEQ ID NO: 1726 - DNA, 103 bp, synthetic construct
  source 1..103: mol_type = other DNA
cactgattgccatccggcctttccgtagtccccatcatacaatttcgcaagtagcaatggtaggtggcggcaccaatccccaaccaggagaaatcagtctggc

SEQ ID NO: 1727 - DNA, 107 bp, synthetic construct
  source 1..107: mol_type = other DNA
cgtcaccaatccgatgggcaccgtgcatggcgggtggtacggcacgctcttggatagtgccatggcctgttctgtgatgacccgtgtgccgaaagggtccgtctaca

SEQ ID NO: 1728 - DNA, 103 bp, synthetic construct
  source 1..103: mol_type = other DNA
tgatcgcaaccgcactaagactcacaaaccataccagctgtgtagccgctttaaaatcactttttggaaaagatttgttaacttctttattttataatgacga

SEQ ID NO: 1729 - DNA, 105 bp, synthetic construct
  source 1..105: mol_type = other DNA
cgctgctgctgcgcaccggcacagcgggcaagaacgtgctgctgctggcgcaggaactggtcgacggtttcggcggcgttgccggcctgctgcacagcggcgccg

SEQ ID NO: 1730 - DNA, 102 bp, synthetic construct
  source 1..102: mol_type = other DNA
tactctcttttttacactattcacatgggttactcgtatttactggaccgactggttcggggaagacaacaacaatgtatgcattattagaggtaattaaaa

SEQ ID NO: 1731 - DNA, 108 bp, synthetic construct
  source 1..108: mol_type = other DNA
aggccgcctacgaggtcagcaatcttgagcaggcgatcgtcaacctgacgatgaccaacatccgtaccgtgctcggctcaatggagctggacgaaatgctctcccagc

SEQ ID NO: 1732 - DNA, 102 bp, synthetic construct
  source 1..102: mol_type = other DNA
cgaatttatctgtgtctttataaatccaagctttctctgcttgacccttacctgggcgaaagaactgggaagaaagggtataactgtgaacgcagtagcacc

SEQ ID NO: 1733 - DNA, 104 bp, synthetic construct
  source 1..104: mol_type = other DNA
caccggcccggcgatcacaaacatcttggcgcccacgcccatgaccagcccctcgcacttgaattccagcgccggggagaccaccgcgttggcaaacccggtga

SEQ ID NO: 1734 - DNA, 105 bp, synthetic construct
  source 1..105: mol_type = other DNA
gaagcatccaaaagaaaaagctacgagctacatatttttcaaaaactcccatactaccactagtatccatcatagccaaaattacagcattggaatggggcttca

SEQ ID NO: 1735 - DNA, 111 bp, synthetic construct
  source 1..111: mol_type = other DNA
tacgataccaaaaaaagaaagcggacgcaaaaagcgtccactttcttttttggtcggagtggcgggattcgaacccacggcctcttggacccgaaccaagcgcgataccaa

SEQ ID NO: 1736 - DNA, 118 bp, synthetic construct
  source 1..118: mol_type = other DNA
agcgcgccgagcacgacgaaggagagggccgggtaggcgtacgcggggtccacgaagtgcaagaagaaggcgacgaagaacaggatcgccttggggttgagcagactggtgatcatcg

SEQ ID NO: 1737 - DNA, 105 bp, synthetic construct
  source 1..105: mol_type = other DNA
cacaccggtgtggcaatccgtatcctctctaaaaaaacaggcaggtgcccaatgctgcacttgcctgttttataccatttatatacttatcttcccgtcataata

SEQ ID NO: 1738 - DNA, 106 bp, synthetic construct
  source 1..106: mol_type = other DNA
gaggctgtgcctgtcgacgtgcaggtgatggtggcgccgggcaagatgggcatgtccatcgtcggcctgccggacaaggctgtggcggaaagccgggagcgggtgc

SEQ ID NO: 1739 - DNA, 108 bp, synthetic construct
  source 1..108: mol_type = other DNA
cgatgcgttcggtcgggtccaccgcgccgagcagcgccgcgagcatcgtcgtcttccccgcacccgtaccgccgacgacgaggaaggccagacgcgcgcgaacgatgc

SEQ ID NO: 1740 - DNA, 102 bp, synthetic construct
  source 1..102: mol_type = other DNA
caagtacatcagcaatagggataagtaatgtaacatttggcatactgtttccacgttcccatttactaactgttttatccgacacaaacaacttatctgcta

SEQ ID NO: 1741 - DNA, 106 bp, synthetic construct
  source 1..106: mol_type = other DNA
atgacccgcagttccgttttgcgcggtactgcggatgcatcgtaggttccgtagttggtgtaaaaaatgtttccagcttcctgtccatttttataaagggtgaaat

SEQ ID NO: 1742 - DNA, 105 bp, synthetic construct
  source 1..105: mol_type = other DNA
gccccggctcggggcggagcgtgccggccagcggcaggcccagcgcgcgggcgacttcgacggccttgagccggcccggcgccgggccccgcacgacgacggaga

SEQ ID NO: 1743 - DNA, 113 bp, synthetic construct
  source 1..113: mol_type = other DNA
ccacggtcgtgctggaggccgggcaccgctccggctccctcaacaccgccgggcacgcggcggcggccggtcgcccgctcggcgcggtccccggcccggtgacgagcccggcc

SEQ ID NO: 1744 - DNA, 106 bp, synthetic construct
  source 1..106: mol_type = other DNA
cgagccagtcctcgtcgcgcttcagtttccctttcgggtgggaccagtcatcgtatttaggccggtggacgatggcgatctggagtccgccgtcggcgggagaacg

SEQ ID NO: 1745 - DNA, 102 bp, synthetic construct
  source 1..102: mol_type = other DNA
cgattgcccgatcaaaccattcttgatcagaaagttttatattttttagcttgcaaaatagattaaaaatacgtatcataacatttggatacttcctttggg

SEQ ID NO: 1746 - DNA, 109 bp, synthetic construct
  source 1..109: mol_type = other DNA
ttggtcgttgctacgataacgacgagggaaaaggtaataagctcacgattatcagagaactcgggaagttcatatactgaaccgtgggtttgattcttaaaacctatat

SEQ ID NO: 1747 - DNA, 110 bp, synthetic construct
  source 1..110: mol_type = other DNA
agcacgcagagcagggtgaccagggcgctgatccagaaggtgcgcaggaagatctcgtagtagtaggggtcgctcagcagcgccaggtagtgggccagggtgtagctacc

SEQ ID NO: 1748 - DNA, 112 bp, synthetic construct
  source 1..112: mol_type = other DNA
ctaaaggcttataaataaaaggtttataaataccccgtggaaactagatgtggtctgggcggtgggacttgaacccacgacctccagatcccgattctggcgttctagccaa

SEQ ID NO: 1749 - DNA, 106 bp, synthetic construct
  source 1..106: mol_type = other DNA
cgaaatgcggcgtacgtggaagcgtaccgggggttcgaatccccccctctccgccattatttcctaacaagctgccacgcccttcagggcgcccgggcctgatcgc

SEQ ID NO: 1750 - DNA, 103 bp, synthetic construct
  source 1..103: mol_type = other DNA
atataatactaatgcaatccaactaccaattagcccttcaccagcgcgataccaagtacctgttgcacaccctccagccaatactattccaattccaaaaata

SEQ ID NO: 1751 - DNA, 104 bp, synthetic construct
  source 1..104: mol_type = other DNA
ccatttgagttaattaaaaccagctgtaactttttcggatcgagttatgatggacgtaaagagggaacaaagcatctaataggtgtcactcataagccgcctat

SEQ ID NO: 1752 - DNA, 112 bp, synthetic construct
  source 1..112: mol_type = other DNA
cctcgatggcggcccggctgccgccgtgttcgcggctgatgtcctgggagatcttcatcgagcagaatttcgggccgcacatcgagcagaagtgcgcggtcttggccggttc

SEQ ID NO: 1753 - DNA, 105 bp, synthetic construct
  source 1..105: mol_type = other DNA
ccgttgcagccgcatgtggttacgatttaaccaatcatcatcacgcccttgctgatgcggaggcttgtgcttggatagccaaggaaatattgtaagatactggcc

SEQ ID NO: 1754 - DNA, 106 bp, synthetic construct
  source 1..106: mol_type = other DNA
cttattaaaggggacttatttatggaatagtggaatgttcatatttagagctgatgttatattgagagaaattgaaaaatatattcctaagatgtataaatgttta

SEQ ID NO: 1755 - DNA, 111 bp, synthetic construct
  source 1..111: mol_type = other DNA
aggaacagttggcggaacgcctggatgtttccaggcaggccgtgtccaagtgggagtccgggcagtcctatccggaaatggagaagatactccagctctgtgaaatgttct

SEQ ID NO: 1756 - DNA, 106 bp, synthetic construct
  source 1..106: mol_type = other DNA
ggcaaaaccgattagaaattttgtatattatgggcctgtagctcagttgggagagcgttcggttcgcatccgagaggtcaagggttcgaatccctccaggtccacc

SEQ ID NO: 1757 - DNA, 107 bp, synthetic construct
  source 1..107: mol_type = other DNA
atacgctggtcgtatattaattgacctgcctgacgaatatttgctgtggtttgctaagaagggcttcccatctggtgagctgggtgacttgttaaaattgtgtctgg

SEQ ID NO: 1758 - DNA, 102 bp, synthetic construct
  source 1..102: mol_type = other DNA
catctttctcctgtctgcccttatagacagcgccgggatccgttccgccgtgcccagcgtctattacaattttatatgccaaatggtgactccttgaatcgc

SEQ ID NO: 1759 - DNA, 105 bp, synthetic construct
  source 1..105: mol_type = other DNA
gtgctagagccttaatcaatgaaccgaaactgattttagctgatgaaccgacgggagctttggactcaaaagcttccagattattactggaaacaatgtctgaaa

SEQ ID NO: 1760 - DNA, 120 bp, synthetic construct
  source 1..120: mol_type = other DNA
tacttcctggcagtttagcattatcgatttcataagcctgcacctgtgcttgggccatcttaacgaaagcttcacatcctttagactggattgtggattggtttttcgtgatattgggga

SEQ ID NO: 1761 - DNA, 115 bp, synthetic construct
  source 1..115: mol_type = other DNA
gcgtggcgggcagcgcgtcattccccagcagcatcatgctggccgccgccatgaatccctgcccatgcggctattttgggcaccccacccgcgcgtgcagctgcacgccctatgc

SEQ ID NO: 1762 - DNA, 108 bp, synthetic construct
  source 1..108: mol_type = other DNA
ttctccactctcaatgtccacttctgcaaaccttccactaatgtgcatcgtatgattatgaagttcattcttctcatccaacaataaatttcttaaaaacaattccaa

SEQ ID NO: 1763 - DNA, 110 bp, synthetic construct
  source 1..110: mol_type = other DNA
caccgctgagcgggacctgtcggatctcgacgtcgaagtaccgcgcgaatttctcccagcagacctgcaccgggccgcagacgaaattgggtgtaccggtgccgccgcgt

SEQ ID NO: 1764 - DNA, 105 bp, synthetic construct
  source 1..105: mol_type = other DNA
cgacctcagccagccgttcgtcgacgcgtcgctgcccgacggctcgcgtctgcacgtcgtcatccccgatatcacccgtcggcactgggccgtcaacatccggaa

SEQ ID NO: 1765 - DNA, 104 bp, synthetic construct
  source 1..104: mol_type = other DNA
catcgaggaacgccgcgtccttcgcgcggcgagcgtcttcggcgagacgttctgggaaaacggggtttcggctctcgtgggcggcgcgccggtggcgcggcggc

SEQ ID NO: 1766 - DNA, 111 bp, synthetic construct
  source 1..111: mol_type = other DNA
catgcggagtgtataacgactgccgttattaacgctagacgttaaacctaaactccaccacgtccccgtcggccatgacgtagtccttgccctccatgcgcaccttgcctg

SEQ ID NO: 1767 - DNA, 107 bp, synthetic construct
  source 1..107: mol_type = other DNA
gggaaaatccggccgcggccggatcgggagacacctttcgcgagggcaagtggcggacggtgagggattcgaaccctcgagacggttccccgcctacacactttcca

SEQ ID NO: 1768 - DNA, 117 bp, synthetic construct
  source 1..117: mol_type = other DNA
tatgtgtatgcttctgacaggagctgaggctatccgtgatgtgcttctgttcccgacgatgaagagccttgactctgacaaaaaagcaaataaggcatctgagagcgctgtaaaaga

SEQ ID NO: 1769 - DNA, 105 bp, synthetic construct
  source 1..105: mol_type = other DNA
atagtcttgatgatatttctgtaaatcactgggatgcctatatggatattattcatctcatttctatgcatgatgaggcaatgagtgcttccatgaaaaagtata

SEQ ID NO: 1770 - DNA, 104 bp, synthetic construct
  source 1..104: mol_type = other DNA
caagacatctgccggggtatgagcagtggccgaataatcagctggggtatggggtgctgtgtgtggaggagagcctgccattttaaaaatgacattgacatgtg

SEQ ID NO: 1771 - DNA, 102 bp, synthetic construct
  source 1..102: mol_type = other DNA
agctggcagaggagaatcattttggaaagctggtggctcatgcgccttacactatgaactgctgtgctgccaaagaaaacctcagggattttgccagggaaa

SEQ ID NO: 1772 - DNA, 103 bp, synthetic construct
  source 1..103: mol_type = other DNA
tgcagagcaagggagatccgatcaccgacctgcacgaaaacatggcggcagagcagaaagcaaggacgacttacgacaacatcctccgcttctgcgacgacta

SEQ ID NO: 1773 - DNA, 109 bp, synthetic construct
  source 1..109: mol_type = other DNA
aaacattagccagaaaatattctacctgtccttctggtaaaaaagggggcgatctgggtgagtttcgtcaggggcagatggtacctcaatttgataaaatctgtttcac

SEQ ID NO: 1774 - DNA, 103 bp, synthetic construct
  source 1..103: mol_type = other DNA
cttgacaaactgtcaaggttttttcgatgtactcagcaattactcacctctttttatccatataaatataatttttcttatcttggtatttctctgatggcta

SEQ ID NO: 1775 - DNA, 113 bp, synthetic construct
  source 1..113: mol_type = other DNA
aacctggttatataaaagcatatttacctggtgtaagagaaaatggtggtcaatacacacatgcatcttgctgggtaattattgcacaaacattactaggatttggaaacaaa

SEQ ID NO: 1776 - DNA, 107 bp, synthetic construct
  source 1..107: mol_type = other DNA
aagtttccgggaccgtaatggtctctttttttgttgtacggactctttataaatgaagctcttaaagacagtacccgctgcaatgatggtagcgggaggcctgtttg

SEQ ID NO: 1777 - DNA, 108 bp, synthetic construct
  source 1..108: mol_type = other DNA
ccggggcgtgacttacatatacggaatgttctaccggtttgggctgattgatgtgccgtaactgaggaggtgaatctcagttgggaaggacggtagcattatagaaaa

SEQ ID NO: 1778 - DNA, 109 bp, synthetic construct
  source 1..109: mol_type = other DNA
cgccgcctgcgccgcttcctcaccgacgacgccgggatgagcacggtcgagtacgcgatcgggacgctcgccgccgcggccttcgcggccgtgctctacagcgtcgtca

SEQ ID NO: 1779 - DNA, 102 bp, synthetic construct
  source 1..102: mol_type = other DNA
cgtaggaatttctcatgacccataaaattattctcgataccgatccgggtatcgacgatgccatggccattctgtttgccgaggcgcaccccgccatcgagc

SEQ ID NO: 1780 - DNA, 109 bp, synthetic construct
  source 1..109: mol_type = other DNA
gccgcgccggcctggagcagggcgtcctgacaggcccgcgccgtgtgcccggtggtgagcacgtcgtcgatcagcagcaccgcgccggtgggcaggaagccctcgtggg

SEQ ID NO: 1781 - DNA, 106 bp, synthetic construct
  source 1..106: mol_type = other DNA
atatgaatctatccttagtagctattgatgaggctcattgtatttcgcagtggggacatgattttcggccaagctatttaaaaattaaaacccttttaaaagagct

SEQ ID NO: 1782 - DNA, 109 bp, synthetic construct
  source 1..109: mol_type = other DNA
caggtcgtaacccaatcgctttgcgagactacggatctggatctcgtcccactgctggcgcggtcccgcgatatcgcgccgcaggtacccgatagcgcctattctcgcc

SEQ ID NO: 1783 - DNA, 114 bp, synthetic construct
  source 1..114: mol_type = other DNA
gctttcaaaagttaagttgttgcttacaaccctttcaagcagctaactatttatgatacggttccccccgaacaatccgaaacgcccggtaaacctgctccaccagcaccaacc

SEQ ID NO: 1784 - DNA, 105 bp, synthetic construct
  source 1..105: mol_type = other DNA
tccatatattcgcaatatcctctataaatcgttctagtaagctcgttccgtcatgagaaccatatgtatttccaaagctgatattaattgccaccggctgtttat

SEQ ID NO: 1785 - DNA, 102 bp, synthetic construct
  source 1..102: mol_type = other DNA
ctcaacgttatcttgattcgaaaaatattacctaccgcctatgtaatgcgaagatgcagcgcggacgcaaagagctcgacgcactgggtgctcgctctctac

SEQ ID NO: 1786 - DNA, 107 bp, synthetic construct
  source 1..107: mol_type = other DNA
gccgcgtacatcgcacctaatgtgtaagatgggaagtaaccaaatgcgccgtctgtccagtggatgtcttgcatacaaccgttagtgaagttgccttgagtgcttaa

SEQ ID NO: 1787 - DNA, 104 bp, synthetic construct
  source 1..104: mol_type = other DNA
gatgactgtcgcggccctgttcgagccggatcaggtattcgacactgacgcccgcgagcatcgcgacctccgcgcgtcgcagacccggcgtgcgcctgcgctga

SEQ ID NO: 1788 - DNA, 107 bp, synthetic construct
  source 1..107: mol_type = other DNA
cacccttggccgcgacgaaatcgagctcggccggcgtcaaggacaggggtttccagtcgaggccgccttcgagcagcagggggcggccggcattgcgggcaccctgg

SEQ ID NO: 1789 - DNA, 107 bp, synthetic construct
  source 1..107: mol_type = other DNA
tgatttcctacgaatagataagtaggaggaagaaaatatgtataataaagttatcatgattgggcgtttaacgtctacaccagaattgcacaaaaccaacaatgaca

SEQ ID NO: 1790 - DNA, 111 bp, synthetic construct
  source 1..111: mol_type = other DNA
ggtcatgcagggatacgtctttacgtgttttcttcagagatcttaagtgcattaagatttcgttttcaatacatctggcggcaaaagtcgccagctttgtgcctttgcctt

SEQ ID NO: 1791 - DNA, 110 bp, synthetic construct
  source 1..110: mol_type = other DNA
ggcgacctcgtcggggccgggcgaggtccggcccgccaagtcggccaggctccacgcgacgcgcaatgtgcgatcgagcccccggatgctgagcagcccgcgatcgaccg

SEQ ID NO: 1792 - DNA, 108 bp, synthetic construct
  source 1..108: mol_type = other DNA
tatcacgaaaaaccaatccacaatccagtctaaaggatgtgaagctttcgtaaagatggctcaagcacaggtgcaggcttatgaaatcgataatgctaaactgcccga

SEQ ID NO: 1793 - DNA, 106 bp, synthetic construct
  source 1..106: mol_type = other DNA
atccgatatctgcttcaccagaaagtacagcagtcatcgttttgtcggctccaaatcctgtgacgagctccagttcaatgccctcttgccggaaataatctttttc

SEQ ID NO: 1794 - DNA, 103 bp, synthetic construct
  source 1..103: mol_type = other DNA
tggaatcggtgggaatgaaaatcaccgttaattatggagaaaaggatgggaaaattgtcaagggttctaagacctacggcgatgtcaagaaagaagtgacaga

SEQ ID NO: 1795 - DNA, 103 bp, synthetic construct
  source 1..103: mol_type = other DNA
ccgcacgcacgccgcgcactggagatcgccgcagccggtggccatcacctgctgctggtcggcagccccggatgcggcaagaccctgctcgcctcgcgcctgc

SEQ ID NO: 1796 - DNA, 110 bp, synthetic construct
  source 1..110: mol_type = other DNA
taattggctcgccacgatttacagaactatcgaaaacagtgccatcgataagcgtgccgtggtagtgcactttcactttacttgttgcggttgggtgaacgtcacctgta

SEQ ID NO: 1797 - DNA, 104 bp, synthetic construct
  source 1..104: mol_type = other DNA
agacattccctttgatcgttcgatcaacccgtatagaggctgcgagcatggctgcatctattgtttcgccaggccaagccatgcgtattgggatatgtctccgg

SEQ ID NO: 1798 - DNA, 102 bp, synthetic construct
  source 1..102: mol_type = other DNA
cgtcgaaaacgtcgtttgatttcccaggtttcgtaccggcttacattcgtcctttattctgtgaaggtattgggccattccgttgggcagcgctgtctggcg

SEQ ID NO: 1799 - DNA, 104 bp, synthetic construct
  source 1..104: mol_type = other DNA
cgaaagtcagctcaggagctcttggtagaggctatgttctgtagagaaccttgaccacatgccagccaaattttgttttgaccaagtgcggagttaacacttca

SEQ ID NO: 1800 - DNA, 108 bp, synthetic construct
  source 1..108: mol_type = other DNA
tcaactctgtcattagtatttcacaactcagtcacactaataattttaaatttacaattatttgtactccccccaaaaagtcacaccaaaacatccccctcaaactcg

SEQ ID NO: 1801 - DNA, 102 bp, synthetic construct
  source 1..102: mol_type = other DNA
aatcaaaacgtcccccctctttgggtaaatcggctggggctaaattgaccgtaatgcgcttcgctggaaactcaaagcgagaattgatgatcgcgctacgca

SEQ ID NO: 1802 - DNA, 114 bp, synthetic construct
  source 1..114: mol_type = other DNA
ggaccctgtcgcggatcagcgtgtgcctcgttttcacctggggccagtcgaacgctttgccgttataggtgacaagagactgaatatcgacttcactcagaaagctgtgataga

SEQ ID NO: 1803 - DNA, 102 bp, synthetic construct
  source 1..102: mol_type = other DNA
acctcccgtctgaaatatagtcgcaatgcgttgtgcataaatgcacttccttttgctcgttatttcagacagcgctatgctccctttatccgccacaggcgg

SEQ ID NO: 1804 - DNA, 108 bp, synthetic construct
  source 1..108: mol_type = other DNA
atgcgcgacgacctcctggccaccacgatgatgagcgtcggcgccttcatctgcggcatcggcaccctgctcgccccgctgcggcaccgcgccgtcaacgccctcgcc

SEQ ID NO: 1805 - DNA, 104 bp, synthetic construct
  source 1..104: mol_type = other DNA
aaccgccggcaccccggtgagatgccctccctgttcatcgtggtggatgagttctccgaactcctgcatgcccgtccggagttcgccgacgtcttcgccgcagt

SEQ ID NO: 1806 - DNA, 105 bp, synthetic construct
  source 1..105: mol_type = other DNA
ccggctttccaccacatccgcaccgcggcttcgaaaccatcacctacatgctcgaggggcgcatgcgtcacgaggatcacatgggcaatgtcgggcggctggaaa

SEQ ID NO: 1807 - DNA, 105 bp, synthetic construct
  source 1..105: mol_type = other DNA
aggcgccagaagtgaccgttgaggtgcatataagcaacggaatgcctggctttacgctggtggggctacctgaaacaacggtcaaggaatctaaagatcgagtga

SEQ ID NO: 1808 - DNA, 114 bp, synthetic construct
  source 1..114: mol_type = other DNA
aagagcgctttggtctagaatacgacctcgatatttacatgatcgtggcggttgatttcttcaacatgggcgctatggagaacaaaggcctaaatatctttaactctaagtttg

SEQ ID NO: 1809 - DNA, 110 bp, synthetic construct
  source 1..110: mol_type = other DNA
cttttccgaagcatcattgaaaagccttcggggctggtaattttgtcggggcccgtgaattctggcaagaccacgactctctatgccgccctgcaggctttgaataagcc

SEQ ID NO: 1810 - DNA, 102 bp, synthetic construct
  source 1..102: mol_type = other DNA
gccagaacaccacgccggcggccagcaccatgtggaggcccgagatcgacaccacgtggtagatgcccgcggcgcggagcgcgtcgttggtcgccggtccga

SEQ ID NO: 1811 - DNA, 104 bp, synthetic construct
  source 1..104: mol_type = other DNA
caccacgtgcacggtgtcgtcggcccggatcgctccgagcgcctggatcttcacgtcgtactgatcgctccagaagtacggcacctgcgcgaccggatcgacac

SEQ ID NO: 1812 - DNA, 103 bp, synthetic construct
  source 1..103: mol_type = other DNA
agtcgaagaccaccacgcgaccaggcaggaacaggctcatggcctccaccgtaacgtgggaccggtgaacgacttcgtgtccgtccgaccgtccgatgccgcc

SEQ ID NO: 1813 - DNA, 118 bp, synthetic construct
  source 1..118: mol_type = other DNA
ataggtattagttttgttgaataaataagggtgccggagattgaaggttatcattcaaccgtgacagactttgctaaattgcgtggcttatctacgtctgtacctttaataagagaaa

SEQ ID NO: 1814 - DNA, 106 bp, synthetic construct
  source 1..106: mol_type = other DNA
aggggcaggtcggtgagcgaccgcaaccacggcaggtcgtcccacgtcagcgggttgccgaagatctgtgcccagcgcaacaccgcaccttgcgggttctcctccg

SEQ ID NO: 1815 - DNA, 102 bp, synthetic construct
  source 1..102: mol_type = other DNA
ccgggacaagtcgatccctgggaggggcgatgttcgatacgtacgtgacgatcgtcggcaacgtgctgaccgcgccggagtggcgccggaccacgcagagcg

SEQ ID NO: 1816 - DNA, 109 bp, synthetic construct
  source 1..109: mol_type = other DNA
ttgcctttttcgaataatactatagggaggaaaaacatgtataacaaagtcatattaattggacgactaacagctcaacctgagctaattaaaacgacaaatgacaaat

SEQ ID NO: 1817 - DNA, 103 bp, synthetic construct
  source 1..103: mol_type = other DNA
agcagtgcctttttttgttcaaaaaaaagcgaatcttttgacgagtcagcataataatacggtttggcaacctcagctttatgcgagaaccagctcgcacgct

SEQ ID NO: 1818 - DNA, 111 bp, synthetic construct
  source 1..111: mol_type = other DNA
taataaatggtattgctatgaataatattagcgatggaagacctcaatggaataactggggaggattaaatgatgtcacaagaaaccaagaatttacttatgggctacaac

SEQ ID NO: 1819 - DNA, 110 bp, synthetic construct
  source 1..110: mol_type = other DNA
cgaaagtcctctggtcagctgatagagtattgcacttatcatctccatatgagccagttcttccgtaccgatatccgtcagcatcgcctgaacttccctgctgggtgcag

SEQ ID NO: 1820 - DNA, 106 bp, synthetic construct
  source 1..106: mol_type = other DNA
ccgcgctttgaatatcgtggcgtcttcttagatgtcgggcgtaacttcaaaaccaaagccgcggtgctgcgtttgctggatcagatggcggcttacaagctgaata

SEQ ID NO: 1821 - DNA, 104 bp, synthetic construct
  source 1..104: mol_type = other DNA
tgaataattggaataagtagaaaaaaataaaaagtgtaacacacgatctagaatttcacatgttacactttcgacaaattctaatttatttccttttctccaaa

SEQ ID NO: 1822 - DNA, 100 bp, synthetic construct
  source 1..100: mol_type = other DNA
cagaggatcgcgaaaatgaagtaaaggagcagtcttactgacaaccgatatttcgttggcgaccccggcaggattcgaacctgcgaccatccgcttagaa

SEQ ID NO: 1823 - DNA, 117 bp, synthetic construct
  source 1..117: mol_type = other DNA
ccctaaaatgctgctttttgaatgtataaaacttagaaaaccgcacttacttatgataaggttcacccttcataatcctaaaactacggtaaatctgctcgactagcacaagcttca

SEQ ID NO: 1824 - DNA, 108 bp, synthetic construct
  source 1..108: mol_type = other DNA
ggttgattttgttggagcaggtgtatcgggggtatcggataaataggggggaaccgtatcacaaatagtggtaaagcagaagatagaagttgtttttgataaagatac

SEQ ID NO: 1825 - DNA, 103 bp, synthetic construct
  source 1..103: mol_type = other DNA
gcacccgctcccggctttccgcgaccgccttgtccggcaggccgacgacgatgaaattgggaaggccgggaacgagctggcactgaacctccacgccgcgcgc

SEQ ID NO: 1826 - DNA, 105 bp, synthetic construct
  source 1..105: mol_type = other DNA
ctatgagcaatgtaacccgccagccgaaaatcggcttcgtttccctgggctgcccgaaaaacctggttgattcggagcgaatcctgactgaactgcgtaccgaag

SEQ ID NO: 1827 - DNA, 105 bp, synthetic construct
  source 1..105: mol_type = other DNA
aacgagctgctggaagcaaaagcctaaccattggggaatggtcatccatacaaatccaccgtacaatgtctgtacggtggattttttgccgctatgagataagag

SEQ ID NO: 1828 - DNA, 110 bp, synthetic construct
  source 1..110: mol_type = other DNA
agtgattcatacatttcaggtaaatacttttgcatctctcttaagtaaacatctgctctccatacaaacattccactattccataaataatttccatctatgagaaaatc

SEQ ID NO: 1829 - DNA, 101 bp, synthetic construct
  source 1..101: mol_type = other DNA
tcgcagttatcgaacaatcttcgaaaatgtatggaggcacttgtataaacataggatgtataccttcgaagacacttgtacatgatggattagaaggcaaa

SEQ ID NO: 1830 - DNA, 115 bp, synthetic construct
  source 1..115: mol_type = other DNA
agaaattcgtccgcttattcatggttcaagagaagaaagtggaaatgtatcttatgacttatataaagatacagaaaaagaaagtgtttatacgatggtagaagtatggaaagat

SEQ ID NO: 1831 - DNA, 102 bp, synthetic construct
  source 1..102: mol_type = other DNA
cggcctgatccggacgatccttgaaagagagatccgcgagtgtccaggagacgcggagcacacgatccagaccgcgtgcgctgagcgtgcccacgtcgagac

SEQ ID NO: 1832 - DNA, 107 bp, synthetic construct
  source 1..107: mol_type = other DNA
cgagctcgcgcagctcgtcgaggacgtgcaggcagttgacgcagcagaaggtccagaagtcgaccagcacgatcttgccgcgcaggtcggcgagggtcaggtcgcga

SEQ ID NO: 1833 - DNA, 102 bp, synthetic construct
  source 1..102: mol_type = other DNA
tccagactatgcttaatctaatggtagtagtaggactaataccagtaacaggagtaacccttccttttctatcatatggaggtagtagtctattaataacaa

SEQ ID NO: 1834 - DNA, 108 bp, synthetic construct
  source 1..108: mol_type = other DNA
cgatatccggcacgactggaaaatcaaggaattaagggcttttagggagaattggctggggaacctggattcgaaccaggactaacggagtcagagtccgtgggtcta

SEQ ID NO: 1835 - DNA, 100 bp, synthetic construct
  source 1..100: mol_type = other DNA
tgccgtttgatcgctcgatcaacccgtatcgcggttgcgagcatggctgcatctactgctatgcgcggcccagccatgcctattgggacatgtcaccggg

SEQ ID NO: 1836 - DNA, 102 bp, synthetic construct
  source 1..102: mol_type = other DNA
gcttcggcttgcctcgatattgcgccgcataattgacgcaatcaatctagtttgccattgctaggccatatatggtgactattgccaatcccgcaaagaaga

SEQ ID NO: 1837 - DNA, 102 bp, synthetic construct
  source 1..102: mol_type = other DNA
atatgtgaatctcaggtgaaagtgctgctgttatagcacgtgtccatgcccagccccgttgattatcatttatcatttgagcttcatctattacacatacat

SEQ ID NO: 1838 - DNA, 105 bp, synthetic construct
  source 1..105: mol_type = other DNA
agcgccgatacgaccgcgcgagcaacacctgggtggacggcaacaccaactggtacacagtgcagtcgttccgttaccttgccggccacgtgggctgcagcatca

SEQ ID NO: 1839 - DNA, 105 bp, synthetic construct
  source 1..105: mol_type = other DNA
gcctgctgatggccatcgacccggtcctggacatgatgcggaccgccaccaacgtggccggccaggcactgataccggtgatcgtctcggcccgcgagaagatcc

SEQ ID NO: 1840 - DNA, 102 bp, synthetic construct
  source 1..102: mol_type = other DNA
tttctaagtcaattattttttcttctacagatgccgctgttgtaattatcttaaatgtactaccaggttcatatgatgcccatattggtaaatttctactta

SEQ ID NO: 1841 - DNA, 110 bp, synthetic construct
  source 1..110: mol_type = other DNA
aacaccgggattgtcggcgaggaactcttcgcgagcggcatcaatagcttcttccagcgtggcgtacatggtcattggtgtctccctgttttccagaaggtttcagggaa

SEQ ID NO: 1842 - DNA, 106 bp, synthetic construct
  source 1..106: mol_type = other DNA
aatgtattaaagcataatacggttattaacaacaaaggctgctcagctcttgtcaaaaccgtagaggctgaggtacaagtatatgagcttgaaaacggcgaaaaac

SEQ ID NO: 1843 - DNA, 108 bp, synthetic construct
  source 1..108: mol_type = other DNA
ttatcaggcgctggcgctggaaacacctgctatttgctgcaacggcacctatttgtatgattatcaagctaaaactgtcctggatgccgatcctatgcccgtggataa

SEQ ID NO: 1844 - DNA, 102 bp, synthetic construct
  source 1..102: mol_type = other DNA
catattcattgtttaattcttctaataaagagtagagagaagtagatttacctgaacctgtgggtcctgaaaaaattatcattcctgatcgattttttaaag

SEQ ID NO: 1845 - DNA, 106 bp, synthetic construct
  source 1..106: mol_type = other DNA
ggctttcctaaagccgaggtcggaggttggagtcctcccggggtcgccattcccttattccgtgggtcatggggcgcaggcgcgtggcgtcggcagggccttggtc

SEQ ID NO: 1846 - DNA, 106 bp, synthetic construct
  source 1..106: mol_type = other DNA
gcggtgggcccggccggcggatgccgggttagggtgccgggatgctgaccgtgacctctgtgaacgtgaacgggctgcgggccgcggccaagaagggcttcgtgcc

SEQ ID NO: 1847 - DNA, 108 bp, synthetic construct
  source 1..108: mol_type = other DNA
aaacaacgattataacatcacacttttcaccataaacgggctgtataggtgtattatcagcaataccaccatcaatatatttttctcctacaacctctgtactatcgt

SEQ ID NO: 1848 - DNA, 103 bp, synthetic construct
  source 1..103: mol_type = other DNA
aggccgcactggccgaccaggaaaccctgctgatcgaccacaagaactgcgagttcaaggctgccagtaccgcgctcagcctgattgccaagtaccattcgca

SEQ ID NO: 1849 - DNA, 106 bp, synthetic construct
  source 1..106: mol_type = other DNA
agatcgaaacggcctccctccttgggtaggtcggcgggggccagattgactgtgatgtgtttgctcgggaactcgaaattgccgttgagcagggcgctgcgcaccc

SEQ ID NO: 1850 - DNA, 116 bp, synthetic construct
  source 1..116: mol_type = other DNA
ttaatattgatattatttaaaatttttgtcgagtagcgaaaaaccgcatcatttgtggtacgcttcgcctctcataatcttaaatgctcgatacacttgttcgattaagacgacgc

SEQ ID NO: 1851 - DNA, 107 bp, synthetic construct
  source 1..107: mol_type = other DNA
cgcggtcgccgatcgcgacgttgctgatgaaccagcaggtcgtcgccggggtgggcaacgtgtaccgggcggaggtgctgttccgccagggtgtacacccgcagacg

SEQ ID NO: 1852 - DNA, 114 bp, synthetic construct
  source 1..114: mol_type = other DNA
ttggatagagcgtctgactacggatcagaaggttgcgggttcgattcctactatgtgcgccatttttattttttgctagtttttctctttaaagttcttaaatactctttttgc

SEQ ID NO: 1853 - DNA, 107 bp, synthetic construct
  source 1..107: mol_type = other DNA
caacgtaggggacatagtcgtgattacgctatatggaaccgttgggaaaatcacaaatatgaaggttttagatggagtttatgtatacgaagtcaataatcacgatg

SEQ ID NO: 1854 - DNA, 102 bp, synthetic construct
  source 1..102: mol_type = other DNA
accaagtaaaacaatggttagacgatgtcgttattggcctaaacctgtgtccattcgcagccaaaccacaacgtaataaacagattaagatctttgtgagtg

SEQ ID NO: 1855 - DNA, 103 bp, synthetic construct
  source 1..103: mol_type = other DNA
atggcgagcaaagcggcaaccagaagtgcagacatgagcgtgatcatgacccatcctggtacgtctcctcgactgtcctttaatttcggagcaaatcttcccc

SEQ ID NO: 1856 - DNA, 107 bp, synthetic construct
  source 1..107: mol_type = other DNA
gctgcgtacatcgcacctagtgtgtaagacgggaagtagccgaatgcgccgtctgtccagtgaatgtcttgcatacagccattagtgaagttgccttgagtgcttaa

SEQ ID NO: 1857 - DNA, 107 bp, synthetic construct
  source 1..107: mol_type = other DNA
aaaaatgttctctgtacttatatactgaaagccaagacccttataaaaggcttctgccgatcttcttttgaaaaatctatccatcctaactgcatattttcacttcc

SEQ ID NO: 1858 - DNA, 112 bp, synthetic construct
  source 1..112: mol_type = other DNA
aggacagggcggaccggacgccgacccggggctctacggcccccggtcggtcacctggcagatgcacggcgacccggtgatgtggatcgcgggggtgcgcgccctgtacctc

SEQ ID NO: 1859 - DNA, 104 bp, synthetic construct
  source 1..104: mol_type = other DNA
cctctccggccaatgcccacagcgcgacgaccaaccctgccgtcatcaacgtgatgaggacccaacccggaacgtcaccgcggtccggtctctcctctcggcgc

SEQ ID NO: 1860 - DNA, 106 bp, synthetic construct
  source 1..106: mol_type = other DNA
ccgcgtacatcgcacctagtgtgtaagatggaaaatagccgaatgcgccgtctgtccagtggatgtcttgcatacagccatcagtgaagttgccttgagtgcttaa

SEQ ID NO: 1861 - DNA, 102 bp, synthetic construct
  source 1..102: mol_type = other DNA
cccaggcccgccgggtgctggagatcgccgccgccggcggtcacagtctgctgatggtcggcccgcccggcaccggcaagaccctgctggcccggcgcctgc

SEQ ID NO: 1862 - DNA, 102 bp, synthetic construct
  source 1..102: mol_type = other DNA
agagcacctttctggcaaccatgagccacgaaatccgcaccccgatgaacgcggtgatcggcatgctcgaactgaccctcaagcgcgccgaccaggggcatc

SEQ ID NO: 1863 - DNA, 104 bp, synthetic construct
  source 1..104: mol_type = other DNA
cctgagttttatagagatgttgtaactgagatatggaattgtgaggattggacacttaagataatttaattacaacctaatagataattaatacaaatggctta

SEQ ID NO: 1864 - DNA, 105 bp, synthetic construct
  source 1..105: mol_type = other DNA
aacaacaaggaaagcgagctctagagatagccgctgctgggaatcataacttattgtttcttggcccacccggaaccggaaaaactatgctcgcttctcgactgc

SEQ ID NO: 1865 - DNA, 111 bp, synthetic construct
  source 1..111: mol_type = other DNA
aacctatgagcaatgttacgcacccgccgaaaatcggctttgtctccctgggctgcccgaagaacctggtggactccgaacgcatcctgactgaacttcgcactgaaggct

SEQ ID NO: 1866 - DNA, 108 bp, synthetic construct
  source 1..108: mol_type = other DNA
gcagacaggtggcaagcatggtcttgccggagccgggagggccgaccagcagcacgttatgaaatccggcggccgccacttccaaccctcgttttacaaacgtctgcc

SEQ ID NO: 1867 - DNA, 111 bp, synthetic construct
  source 1..111: mol_type = other DNA
aggagagcgacagcagcgagatcacgattgcgatctgatacgcgttaactatccagattgattcagccgggctggcgctgagatcgcgggctatcgtcggcagcgctacgt

SEQ ID NO: 1868 - DNA, 106 bp, synthetic construct
  source 1..106: mol_type = other DNA
aagctcgacaacagcttgcgaacgccctttcacacctaacttctgcatggcatttgaaatgtgattccgtacagttttttcactgataaatagctcgcttgcaatt

SEQ ID NO: 1869 - DNA, 102 bp, synthetic construct
  source 1..102: mol_type = other DNA
ccatgtgtatttttctttttaggtgtcggtgatacccctgctttacatgatccgacgttcgattttgatatggatgttttagaaaatggtgtagaatggtac

SEQ ID NO: 1870 - DNA, 102 bp, synthetic construct
  source 1..102: mol_type = other DNA
ccgcactcagtttcttgctttcgctgtctacatggctgtacacgttgctcgttgtacctatgtcgctgtgacccagccactcctgtatcagcttcatctgaa

SEQ ID NO: 1871 - DNA, 109 bp, synthetic construct
  source 1..109: mol_type = other DNA
caatggtcatcaccagcaccacaaaggacatcatgcgagcaaaatcatccttggtgaacatatcgcgcatcagcgcattaatcaccacgctagcagcagcagcggctaa

SEQ ID NO: 1872 - DNA, 111 bp, synthetic construct
  source 1..111: mol_type = other DNA
acagacgactggctagcatcgtcttgccagtacccggtggacctgcaaaaagcagattgtggccgccagccgccgcgatctccaacgcacgtcgtgcctgatgttgcccgc

SEQ ID NO: 1873 - DNA, 109 bp, synthetic construct
  source 1..109: mol_type = other DNA
aaccggggccgtgctcggcttcccaggcgcggcggagcgcgctcatggcggttgtcttgcccgccccggcggggccgaccagcacgtcgagcatccgtcctgacactgc

SEQ ID NO: 1874 - DNA, 105 bp, synthetic construct
  source 1..105: mol_type = other DNA
ccgtctcggcgatccggtcgaagagcgcggcgttgcccatcgggtacggacggtcgagcccgcaggcgagcactgcgacggtcagaccccccgcggtgagtgcgc

SEQ ID NO: 1875 - DNA, 109 bp, synthetic construct
  source 1..109: mol_type = other DNA
ccaggtcaaaacgcccgccgtccttgggcaggtcggcgggcgcgaggttgagggtgatgcggcgggacgggtattgcagcgcggagttgaggatggcactgcgcacgcg

SEQ ID NO: 1876 - DNA, 105 bp, synthetic construct
  source 1..105: mol_type = other DNA
cgtacatcgcacctagtgtgtaagatgggaaataaccaaatgagccgtctgtccagtggatatcttgcatacagccgttagtgaaattgccttgagtgcttaatc

SEQ ID NO: 1877 - DNA, 106 bp, synthetic construct
  source 1..106: mol_type = other DNA
ctctccgagtatccgaacgaccaccaggccgtccagtggtggtaccacgaccacgccatgaacatcaccaggtggaacgtgttcgcgggtctgtacggcacctatc

SEQ ID NO: 1878 - DNA, 102 bp, synthetic construct
  source 1..102: mol_type = other DNA
agatgctagcaagtgtacaagcaaaacgctcccaccttattcatgctgtatgtggggcaggaaaaacggagttgctttttccaactgttcatgatgcattaa

SEQ ID NO: 1879 - DNA, 111 bp, synthetic construct
  source 1..111: mol_type = other DNA
aggggcagacagccgccaaacgcgcactgctgattgccgcagcgggggcgcacaacctgttgttcagcgggcctccgggaaccggcaagacgctgctggccagtcgtctgc

SEQ ID NO: 1880 - DNA, 111 bp, synthetic construct
  source 1..111: mol_type = other DNA
tagaacttcagccttccaagctgactacgtgggttcgattcccatcacccgctccataatggagttaacacacttacttagtaagtgtgtttttttgtgaaatgatgctaa

SEQ ID NO: 1881 - DNA, 106 bp, synthetic construct
  source 1..106: mol_type = other DNA
atgcaatgccatacggcgaagtaaagggactccttactgacatcgggaccgaggaacttgcccactttgaaatgatatcggcgatactctatcagctcaccaagga

SEQ ID NO: 1882 - DNA, 102 bp, synthetic construct
  source 1..102: mol_type = other DNA
aacccttattatctcctatccatagaagtccagcttctgtcttacccatgcctgtttgagctactattataagattattatctctattttctatcatgtatt

SEQ ID NO: 1883 - DNA, 103 bp, synthetic construct
  source 1..103: mol_type = other DNA
ttgcgggtgagctggtgaacgatggtggcgacgatttcaagatgcgccagttcctccgttccgatatcggtgagagcgcctttgcactccttgtagggcatgg

SEQ ID NO: 1884 - DNA, 109 bp, synthetic construct
  source 1..109: mol_type = other DNA
tagtacggttgtaaggattgaatcaacaccataatttttccagtctaagctatcaacatcccactgtatcgcatgataaccacatttttctgcactttcaataagcaca

SEQ ID NO: 1885 - DNA, 103 bp, synthetic construct
  source 1..103: mol_type = other DNA
acggaggctttcagagcgtcgaccagttgaaggaggtcccaggcatcggagacaggaagttcgccgagatgcgcgacaaggtctccgtgtgaccgccgtcggt

SEQ ID NO: 1886 - DNA, 102 bp, synthetic construct
  source 1..102: mol_type = other DNA
gagcaactggtcctaccggggaagacggcgcaacaggagccaccggtgaaacaggtcccacaggacctacgggcgcaacaggcgaaacaggtgcaacgggac

SEQ ID NO: 1887 - DNA, 102 bp, synthetic construct
  source 1..102: mol_type = other DNA
gcagccgtgcggccagcatcgacttgccggcgcccggcggcccgaccatcagcatgtgatggccgcccgcggccgcgacttccagcgcgcggcgggcaccgc

SEQ ID NO: 1888 - DNA, 102 bp, synthetic construct
  source 1..102: mol_type = other DNA
aatatagtacagaagtaatcggcgcacaccaaattgcaatgaacttcgccagtcttctttatatgattccgctaagtatctcgatgggtgcgacgatcttgg

SEQ ID NO: 1889 - DNA, 112 bp, synthetic construct
  source 1..112: mol_type = other DNA
gctcggagaagtctatatgacaacgctttcggacaggagttcgattctcctcatctccaccagttattcggtcgaagtcgaaaactttgaccatagcataagggccctaacc

SEQ ID NO: 1890 - DNA, 105 bp, synthetic construct
  source 1..105: mol_type = other DNA
atgaacagcggctcaatcgcgggttacacgcgcgcggcgtaaaccgcgtgatcctggatagtcgtccggtacatgccgcccatccccacagcgaggccgtccgtg

SEQ ID NO: 1891 - DNA, 102 bp, synthetic construct
  source 1..102: mol_type = other DNA
ggctgatcctggaggacgactacgacggggagttccgctacgaccgcgagcccgtcggcgccctccagggactcgaccccgaacgggtcatctacgtcggct

SEQ ID NO: 1892 - DNA, 116 bp, synthetic construct
  source 1..116: mol_type = other DNA
agacctccgtgttccgaaatcgacgaccgcacgttctagcctgaccatcatggcagcagtgagcaaggtattcgcggcgaggctcgcaggtctggtggtcctgggacccgacggcg

SEQ ID NO: 1893 - DNA, 107 bp, synthetic construct
  source 1..107: mol_type = other DNA
gaaagccgtcgataattttgacgatacactgaatgtcaaattctcgacatatgcagttccaatgatcatcggtgagatccgccgctatctacgggattataacagta

SEQ ID NO: 1894 - DNA, 107 bp, synthetic construct
  source 1..107: mol_type = other DNA
cagggctcgacgggtggagtcatgggcgtagcccttgtccgcgatcagcacgtccggtggcagcggggtgaggtcggcgaagatcgaggcgccgtcgcagccgacgt

SEQ ID NO: 1895 - DNA, 102 bp, synthetic construct
  source 1..102: mol_type = other DNA
tgccataatttctcgaaaatgagacaaattcagtggtacaaactggagtgaagtcagaaggatgagaaaacagcatcacccattgcccccgataatctgaca

SEQ ID NO: 1896 - DNA, 102 bp, synthetic construct
  source 1..102: mol_type = other DNA
ccgcagcgtttgccccctatggccagccgcaactgtcgatggcgccgatttcctcgggcaacctcgacagcattgacgtggtccgcggtgccggttcggtgc

SEQ ID NO: 1897 - DNA, 103 bp, synthetic construct
  source 1..103: mol_type = other DNA
cggtgtagagcaccgccccgaaggcggccgccgcgatggtgccgatggcgtactcgacggtcgacatgcccgactcgtcggccaccagcaccgccacacgagc

SEQ ID NO: 1898 - DNA, 109 bp, synthetic construct
  source 1..109: mol_type = other DNA
ttacagataaaaatacaagacataaaaatatagattttccagggcataatcatgcatggctatatgatgtgaataaaatagaacccgatgtaagggattatttaaaaaa

SEQ ID NO: 1899 - DNA, 114 bp, synthetic construct
  source 1..114: mol_type = other DNA
cggcgatgcggcaaggtccattctgtgcgtcaaccttgatggtgacgccgcccttgaagaacagcagcgtgccggccggcagcatggagaggttcggcaccccttcgatcacaa

SEQ ID NO: 1900 - DNA, 102 bp, synthetic construct
  source 1..102: mol_type = other DNA
cgctgtcggcatcataaaatctcgctgcaagccttgctatcgtactttttccgcctcccgacggtcccacaagtgctacgctttctccttgattgacacgaa

SEQ ID NO: 1901 - DNA, 103 bp, synthetic construct
  source 1..103: mol_type = other DNA
gcgaacagcttcgacagataaaacggcgcagtcacgcccactgacagcgcataagataatcggcagctttcttttcagcttcggacttttcactatagttcag

SEQ ID NO: 1902 - DNA, 102 bp, synthetic construct
  source 1..102: mol_type = other DNA
tgccgagaccacagaccggattgtagacgaattggtggcagatattcggtcatccattccggcacaggagggcggcaaggtcttttatccgggagaaattga

SEQ ID NO: 1903 - DNA, 111 bp, synthetic construct
  source 1..111: mol_type = other DNA
cgcgctgcgacagcatttcgtccagctccatcgaacccagcaccgtacggatattggtcatcgtcaggttaataatcgcctgcaccagattgctgacttcataagcggcgc

SEQ ID NO: 1904 - DNA, 110 bp, synthetic construct
  source 1..110: mol_type = other DNA
cggttaggacgacagattctcattctgtaaagaggggttcgactcccctagggcgtaccactcctgatgataggcaatcgtcatccgtttcgatcgaccttggccggccc

SEQ ID NO: 1905 - DNA, 112 bp, synthetic construct
  source 1..112: mol_type = other DNA
ggcatggagtaccgctggctgagatagcgcagagaagctcccaattcaccgtccgggccaccatactgactgataatgaccgctgccagcttggggttgggattcttgatct

SEQ ID NO: 1906 - DNA, 102 bp, synthetic construct
  source 1..102: mol_type = other DNA
agaaaatggaggcggtcggtacgctggttggcggcattgcgcacgatttcaataatatgctggctgcgctgcaggggaatgtctacctggctaaaagccgta

SEQ ID NO: 1907 - DNA, 103 bp, synthetic construct
  source 1..103: mol_type = other DNA
actggccactatatctggtgatagccttctcatggatgattgcctttttcgagtattgctgtcaggttcccgccaaccgcatcggatttatcgacaatggcgg

SEQ ID NO: 1908 - DNA, 107 bp, synthetic construct
  source 1..107: mol_type = other DNA
aaagtttccactaaaataggataaagcatctctgttttccctgcacctgttacagcccaaataagatgatgtcttttttctgaatggcaaagtattctctttgagat

SEQ ID NO: 1909 - DNA, 105 bp, synthetic construct
  source 1..105: mol_type = other DNA
acgcacggaccacgtgcttgcggatgttgaccgcccacgcggtgcgcgtgacgtcggggatcaccacgtggagccgctcgccgccgggcagcgaggcgtcgacga

SEQ ID NO: 1910 - DNA, 103 bp, synthetic construct
  source 1..103: mol_type = other DNA
cttggctcaaatttcaattcaaagacttttaataatccgttaatcgtactctgtggcagacagagaaagataaagtcatccaaacggcagcggaactttacga

SEQ ID NO: 1911 - DNA, 102 bp, synthetic construct
  source 1..102: mol_type = other DNA
ccatcaacctgctcccggccaccctgcccaagcagggctctggcttcgatctcgcgatcgcggtcgcggtactgggcagcgccggggagctgccgttggcac

SEQ ID NO: 1912 - DNA, 102 bp, synthetic construct
  source 1..102: mol_type = other DNA
gcatggaacccggtctggccgaggtgaccgtgccgaagtggttctacgtctacaaccacctgcacaccgtgcacgcgatcgcgtcatgcaacgccgccgaga

SEQ ID NO: 1913 - DNA, 106 bp, synthetic construct
  source 1..106: mol_type = other DNA
ggcatgaaaaagaccgtgcacaaccccttggggttcaacacggtctaatgtggcggagaagatgggatttgaacccatgcatcacgtttatttgcgatctactccc

SEQ ID NO: 1914 - DNA, 111 bp, synthetic construct
  source 1..111: mol_type = other DNA
gggatgcagaacgatttccgtgcgggatctgatccgcagcagtttaagaatgcggcctgatcggattatcgtcggggaagttcgcggtgcagagatctgtgagctgctgac

SEQ ID NO: 1915 - DNA, 106 bp, synthetic construct
  source 1..106: mol_type = other DNA
ataacatagttgattctatgattgtaggaaattttgtaggggcagatgcacttgctgcggttggcgcatcatatccaataacatttgtacttataacagttgcaaa

SEQ ID NO: 1916 - DNA, 106 bp, synthetic construct
  source 1..106: mol_type = other DNA
aagacctccgcggtcatcgactccgcgctcgatggggtgctgttcatcgacgaggcctacacgctggtgcaggagggcctcagcggcggcgacgcgttcgggcagg

SEQ ID NO: 1917 - DNA, 115 bp, synthetic construct
  source 1..115: mol_type = other DNA
cgggaatttatagtaagtttgctctgctaatcctaaacaatgacacagagaaagattatacatatcgacatggatgccttctatgcctctgtagaacagcgtgataatccagaac

SEQ ID NO: 1918 - DNA, 111 bp, synthetic construct
  source 1..111: mol_type = other DNA
gcacctcagccacttccagatcttcaaaggactccctttccatcacatgacaccagtgacaggaagcatatcctatggaaagaaaaatcggtttgtcttctttccttgctt

SEQ ID NO: 1919 - DNA, 111 bp, synthetic construct
  source 1..111: mol_type = other DNA
cgccggacgtcaccgtcgaagtccatctcgccaacggcctgccgtcgttctccatcgtcggcctgcccgatctcgaagtccgcgaaagccgcgagcgcgtgcgcgccgcgc

SEQ ID NO: 1920 - DNA, 102 bp, synthetic construct
  source 1..102: mol_type = other DNA
agtcaaagcgtcccccttctttgggcagatcggcgggcgccaagttgacggtgatccgcttagcaggaaattgaaaattgctgttgacgatcgcactgcgta

SEQ ID NO: 1921 - DNA, 102 bp, synthetic construct
  source 1..102: mol_type = other DNA
atgtaagttttgagataaaaagtggtgagatatttggatttttaggaccaaatggagcaggaaaatcaactacctttaagatgatatgcggacttttagcaa

SEQ ID NO: 1922 - DNA, 103 bp, synthetic construct
  source 1..103: mol_type = other DNA
cgacggccagcacgcccgcgaagcccacggcggcgagcgtgaggatgccgtactcggccgtgatcgcgccggtctcctcgcccgcggcgtcgacgacgcgggc

SEQ ID NO: 1923 - DNA, 104 bp, synthetic construct
  source 1..104: mol_type = other DNA
gcctcttgatattatagagagaagttgccggaagcatggttctagtttctttggaagaaaagaaggaacgaaggagttaacgcgtattacacataaagctccta

SEQ ID NO: 1924 - DNA, 109 bp, synthetic construct
  source 1..109: mol_type = other DNA
tcgcagggcagttattcatcagcgagaaaacggtgcgtaaccatatctccaatgtgatgcagaaactcaatgttaagggtcgttcgcaggcagttgtagagctaatcaa

SEQ ID NO: 1925 - DNA, 103 bp, synthetic construct
  source 1..103: mol_type = other DNA
gcgtacgcgcggacccgggcggccgggctcgacatggtgatggaccggtgccccgccatcgagatcccggcgctcggcctcggctgaaccgggcacgcgggct

SEQ ID NO: 1926 - DNA, 112 bp, synthetic construct
  source 1..112: mol_type = other DNA
aaggccatgcttcaccgtcagaaattaaatagggagggaataaaaaatacgcttatagtttgtacccaaattgccagaaacgatagaggctagattgataatatttttttat

SEQ ID NO: 1927 - DNA, 108 bp, synthetic construct
  source 1..108: mol_type = other DNA
agagcacatcattcgtaatgatggggtcacgtgttcgagtcacgtaagcggcaccacttttcgtgaaccccagaaaaccgccattttgggccaccctccttctgactg

SEQ ID NO: 1928 - DNA, 104 bp, synthetic construct
  source 1..104: mol_type = other DNA
gagcgaagacgtgcgcacgtcgtagcgcagatgcaccgcgttagacaccttgttgatgttctgcccgcccgcgccctgcgcgcgaatcgccgtgatgtcgtact

SEQ ID NO: 1929 - DNA, 108 bp, synthetic construct
  source 1..108: mol_type = other DNA
gctatacaatgccttatccggaaattcaggcactgttaaccgatattgcaactgaagagcttgctcatgtagaaataattagtgcaattatttaccagttaacagcaa

SEQ ID NO: 1930 - DNA, 107 bp, synthetic construct
  source 1..107: mol_type = other DNA
gaatggtgctaatccagcgtgaatcgagccagttacggggtcttcgtcgccaccatttgcaggccaaaagtaacgcgatacaaagtcttgttgatcgcctttcgcag

SEQ ID NO: 1931 - DNA, 114 bp, synthetic construct
  source 1..114: mol_type = other DNA
tcataagaattggtccattaaacttttcaaattcttctttttgtttccaccatgcattaccataatttcctgcaaagtgtttatatttcttgaattttgggtagtattgtccag

SEQ ID NO: 1932 - DNA, 108 bp, synthetic construct
  source 1..108: mol_type = other DNA
agtttcaaattaaaggggataaaggcatgtactaccccaatagagtgaagcaatggtttgtctatttaagtaaaggctaccctgaagcgaacgaactatttaaagaaa

SEQ ID NO: 1933 - DNA, 113 bp, synthetic construct
  source 1..113: mol_type = other DNA
ggaaaatatttgaaaggggaatggatatgactctatcagaaacactcttcaaagagacgggaaagaaaactggtgttgtgtatgccacaggcatgataaaaggccgggaagtg

SEQ ID NO: 1934 - DNA, 102 bp, synthetic construct
  source 1..102: mol_type = other DNA
caggtggagggtattcacaagtgttgccgatggaagacattaatttgcactttactggcgatttgcatgcgattacgaccgcgaataacgccttagctgcgc

SEQ ID NO: 1935 - DNA, 116 bp, synthetic construct
  source 1..116: mol_type = other DNA
cgagatcaccacggagatcggcccgctcggcgactactacttcgccgaggactaccaccagcagtatctcgccccgaccaagaatccgggcggctactgcaaccatggccccaacg

SEQ ID NO: 1936 - DNA, 118 bp, synthetic construct
  source 1..118: mol_type = other DNA
acgtagacagaaaaaatgggaacgcgaaaaatcatgcgctgccacttccctacgttggtactaaccaaatcaggttctaagggaccagacttacgtctatctcagcataaagcgcccc

SEQ ID NO: 1937 - DNA, 111 bp, synthetic construct
  source 1..111: mol_type = other DNA
aggtcgccaagcgcgagctcctcgagagcgccggccgcaaggaggtggggatgctggtgccgctggtgttcctgatcctcccgctcaccatcgtcttcgccctgttccccg

SEQ ID NO: 1938 - DNA, 103 bp, synthetic construct
  source 1..103: mol_type = other DNA
accggaaaatataatttaaactctgaaggcgatgtagttttcttcctcacaaacttcggacaagatattcttgttttcttgaaagaccacctcgtccccatct

SEQ ID NO: 1939 - DNA, 105 bp, synthetic construct
  source 1..105: mol_type = other DNA
aaatcatcgaataaaactgctaggaatacctcttgatatctaccgcaaacattacaatgcaatttggcgctgagccgttatttgaaaacatttcagctaaatttg

SEQ ID NO: 1940 - DNA, 106 bp, synthetic construct
  source 1..106: mol_type = other DNA
gtccgtcatgattattgacttcataaacaaaaacgccgtccatcagtttaatatttgttatcttaccgacagtaccatataacgtaatcacgacaatatcatctac

SEQ ID NO: 1941 - DNA, 105 bp, synthetic construct
  source 1..105: mol_type = other DNA
agagttatatggagaagaatccggagattattcagaagtttaccaatgcgatccagaaaggcatggattacgtcaactcccactccgccgaggagatcgccaaga

SEQ ID NO: 1942 - DNA, 111 bp, synthetic construct
  source 1..111: mol_type = other DNA
ccgattattgtggtgaatgccaaaaacgccaaccgcgtaaagtgattgcgccttgtagttatcatcaaggtttaggcacttgggttggcgcgataaagtatcaaggccagc

SEQ ID NO: 1943 - DNA, 105 bp, synthetic construct
  source 1..105: mol_type = other DNA
caatcttgccattgcgaacaccatccatcatctgctggaatcccggtctgtcaaagttggttcctgtgtagccatcgtcagcgtactcttcgaccaaatacagtc

SEQ ID NO: 1944 - DNA, 102 bp, synthetic construct
  source 1..102: mol_type = other DNA
accgtattgtggtgggtgaggtcagagggagtgaagctttggatatgctgcaagcaatgaacacaggacacgatggatcgttgtcaaccggtcatgcgaata

SEQ ID NO: 1945 - DNA, 104 bp, synthetic construct
  source 1..104: mol_type = other DNA
agccaaaaagccagaaaatctgcacatcattctacgcgatcacatgctttgtgagcttaaagcggctcaaagcgctctgttccttatccgcaagtacgcggttg

SEQ ID NO: 1946 - DNA, 109 bp, synthetic construct
  source 1..109: mol_type = other DNA
aagatgttgcacagattctgttccgaaagctggacgcagcgcgtattagcaggcttgccgtcaggcattccggggatcggggatgaaatagagggggcgatacagcagg

SEQ ID NO: 1947 - DNA, 103 bp, synthetic construct
  source 1..103: mol_type = other DNA
ggacattatgctgaccattccaaggcagtattttacactgatgcaacaggaaatccatggacagcaacttatattcaagcaaaaggtgatccagtagcagatt

SEQ ID NO: 1948 - DNA, 103 bp, synthetic construct
  source 1..103: mol_type = other DNA
ccattcctattggtccaaattgaggactttgaaacgtcgctacattattagcagctgttttggttacgtaggtcgcagtatggatttcatcattcatcactac

SEQ ID NO: 1949 - DNA, 106 bp, synthetic construct
  source 1..106: mol_type = other DNA
cttcgcttattaccgtacgccctttccgcagcccacaccacaccatatccgatgttgcccttgttggcggaggcagctatcctcaacccggagaaatttctctggc

SEQ ID NO: 1950 - DNA, 106 bp, synthetic construct
  source 1..106: mol_type = other DNA
acttaattagcaaagagtacggcgattggtcgcaaagtagttgaaaactatggtgatcccgacaggaatcgaacctgtgacctacagattaggaatctgccgctct

SEQ ID NO: 1951 - DNA, 108 bp, synthetic construct
  source 1..108: mol_type = other DNA
agtccaattttataatttaaattcacttgatttatccccttcattgttacctcaactgggtcttcgagggttgatatatttatatcgtcatcctttatttcatttaaa

SEQ ID NO: 1952 - DNA, 105 bp, synthetic construct
  source 1..105: mol_type = other DNA
cggtattccccgccgccgcaaccacgacggcattcttgacgtcgacggcgtaggccagcgcggcgcccagcgcacggtcgtcgagcgcggcggccaccggaacgc

SEQ ID NO: 1953 - DNA, 109 bp, synthetic construct
  source 1..109: mol_type = other DNA
aaaatattaactttggagtaggaaaaggggaaatactaggatttttaggaccatcaggtgcaggaaaatctacattacaaaagattctaattggaatgataactaatta

SEQ ID NO: 1954 - DNA, 101 bp, synthetic construct
  source 1..101: mol_type = other DNA
tcctctccagatgttagcttgtcaactacccactacagttgacatggagccattattcaacactcataaggtatggatacacaggctgatctccctgatgc

SEQ ID NO: 1955 - DNA, 111 bp, synthetic construct
  source 1..111: mol_type = other DNA
gcaggttctgcagtgctggccacgatatctgccctgttggctttatattgcgtgcctcagctgaatcagcacaccgcacgaaccaagttcgagcgttgggctaccgatgcg

SEQ ID NO: 1956 - DNA, 102 bp, synthetic construct
  source 1..102: mol_type = other DNA
agcgctgggataagtagcgcatggaggcacccatttcgccgtctggtcccccatactgactcataataaacgtcgccatcttcggattcggtgttgtaatat

SEQ ID NO: 1957 - DNA, 105 bp, synthetic construct
  source 1..105: mol_type = other DNA
agccaaaaagccagaaaatctagccactattttgatcgatcacttactgtgtgagttgaaagcaggccaatctgccatgtatcttatccgcaaatacgcggttga

SEQ ID NO: 1958 - DNA, 106 bp, synthetic construct
  source 1..106: mol_type = other DNA
acctggtgtttcaattgtgttagataaaggagagagtgtgtacacccaatcaggtggtatggcttggatggacaatgggattacaatgaatactaacattaaggga

SEQ ID NO: 1959 - DNA, 102 bp, synthetic construct
  source 1..102: mol_type = other DNA
atctgaaagggctggaagagaaaaagccgattgtattttgcggagatctgaatgtggcacacaaagaaattgatttgaagaatccaaaaaccaaccgaaaaa

SEQ ID NO: 1960 - DNA, 102 bp, synthetic construct
  source 1..102: mol_type = other DNA
aaaatggaggaattttgtttatgaaagctacaggaatagtcagaagaattgatgatctgggccgtgtggtcattccaaaggaaattcggaggacattgaggc

SEQ ID NO: 1961 - DNA, 104 bp, synthetic construct
  source 1..104: mol_type = other DNA
cgatggtaacgcccgaggcaaaagcaacgctgaatgacattgctacagaggaattcgcccatttggagatgatgggcaccatcgtgcatcagctgacacagggg

SEQ ID NO: 1962 - DNA, 104 bp, synthetic construct
  source 1..104: mol_type = other DNA
gcctgagttctataaggatgttgtaacagatatctggaattgcgaggagtggactactaaagttgtatagtagagttatattaagagttagtgtaaaaactagc

SEQ ID NO: 1963 - DNA, 114 bp, synthetic construct
  source 1..114: mol_type = other DNA
cgcggtctgccccgcgatccgggtcgcaaccacctcgccgtgcacaccgaggaccacccgatggagtacctcgacttcgccggtgagatccccgccggtgagtacggcggcggc

SEQ ID NO: 1964 - DNA, 110 bp, synthetic construct
  source 1..110: mol_type = other DNA
atggaaaagaaaatggccgatcatcatgagacgatcggccatggttagtatggctccccaacccggactcgaaccagggacatggtggttaacagccacccgctctaccg

SEQ ID NO: 1965 - DNA, 101 bp, synthetic construct
  source 1..101: mol_type = other DNA
cgcgccgtcgtggctgacgcgttgtacccgagcgccttcgaccagtcgccctggtcgaggccctcgatgcgatggtcgacctcgtcggcggcccttccgaa

SEQ ID NO: 1966 - DNA, 102 bp, synthetic construct
  source 1..102: mol_type = other DNA
accgcactcgtcaagaccgccttcgtaacagacaccgatgctacctgcattccaaccccggacatgggcaccaggcagggacaagggacgcagggacttgat

SEQ ID NO: 1967 - DNA, 105 bp, synthetic construct
  source 1..105: mol_type = other DNA
tgtaatcaatgctttctgcttctagccattttttcatttttttaatggtgtcgcagtttttaatgccgtaggcgattgtgttcataataatgctgactttctttt

SEQ ID NO: 1968 - DNA, 105 bp, synthetic construct
  source 1..105: mol_type = other DNA
cgagcggctgccgcagcgcgtcgagggcgacggcggagaactccggcgcctcgtccaggaagaggaccccgcgggtcgcgcgcgcgacggctcccgggcggatcc

SEQ ID NO: 1969 - DNA, 108 bp, synthetic construct
  source 1..108: mol_type = other DNA
agagcgccaagcgcgcgctggaaatcgcagccgccggcggccatcacctgctcatgatcggcgcgcctggtgccggcaaatccatgctggccgcgcgcctgccctcga

SEQ ID NO: 1970 - DNA, 111 bp, synthetic construct
  source 1..111: mol_type = other DNA
ggtatagagtagagaagatatgctgcgtggatatgtttccgaatacgtatcatgtggaaacggttgtcaaattatccctcaaaaaagatacacctaagattgaggtcacaa

SEQ ID NO: 1971 - DNA, 108 bp, synthetic construct
  source 1..108: mol_type = other DNA
agatgcggctcaatcccaaatcatagtccatcttcatacggtggtacgctttaccaaacgaccagtgtgaaaagcgggtcggcatgccttggtacgcgccgaacgtgt

SEQ ID NO: 1972 - DNA, 109 bp, synthetic construct
  source 1..109: mol_type = other DNA
ccccgatccgtcagtatcaaaacctgatccgtcagataaaagatcttcttgtccggacgcttcgcaaccggacccgcagacgactgaacaggattctttaacccggaac

SEQ ID NO: 1973 - DNA, 102 bp, synthetic construct
  source 1..102: mol_type = other DNA
ggaagacggcgaagatcaccgtgagcgggaggatgccgaacacgagggggaccatcatctggatctccttccggccggcggcctccatgagctcgcggcgac

SEQ ID NO: 1974 - DNA, 105 bp, synthetic construct
  source 1..105: mol_type = other DNA
atttataggagggaaggacaatgaagaatgaaaaggggtttacgttaatcgaaatgctaatcgtattaatggttatttctgtcttattgttgattgtcattccaa

SEQ ID NO: 1975 - DNA, 104 bp, synthetic construct
  source 1..104: mol_type = other DNA
ctgcctggtctgggcgccgcgcgacgagccctatccggtcggctactactgcggcctgcgcgaccccgcgggcaactacgtggagttcagctacggccagccgc

SEQ ID NO: 1976 - DNA, 107 bp, synthetic construct
  source 1..107: mol_type = other DNA
atttaattatttaaaaactgaattaacccattgcacaaactccgtcatactcattaaatcaatctttcgttttgaagttgaagcttcttttatattaaatttttcac

SEQ ID NO: 1977 - DNA, 102 bp, synthetic construct
  source 1..102: mol_type = other DNA
acaccgccaaagcctttggcgatggcttctggagcctgattccgttcaccatgcagatggccttcgtggttatcggcggttatgtggtggccagctcgccgc

SEQ ID NO: 1978 - DNA, 102 bp, synthetic construct
  source 1..102: mol_type = other DNA
cttcagtcacgagtgtcgcgccggcgagcgcggcaatcgaccggttccgttgcagaaagcgccaacgcgtcggagccgcgccgggaatcatctccgaacaga

SEQ ID NO: 1979 - DNA, 108 bp, synthetic construct
  source 1..108: mol_type = other DNA
gaaaaggaacaaagcctgctgaacgcttagagaagtacgcgcaagtttttcataccgttgagggcaacacgaccttttacgcgacgccaagtatgtcgacagttcata

SEQ ID NO: 1980 - DNA, 102 bp, synthetic construct
  source 1..102: mol_type = other DNA
atcggcgcaaccctttgatttacctggcttttctcgtcagaagagtgactgtctcgacagttgtttcagtttccaagggaagttctttcacttcctcaccat

SEQ ID NO: 1981 - DNA, 102 bp, synthetic construct
  source 1..102: mol_type = other DNA
atcatagcctgacagattatcattccgcacttaaataaaagaagaacaaggggttatcggcaagcgatcccttcttgttcttctttcgcgatttacgattta

SEQ ID NO: 1982 - DNA, 112 bp, synthetic construct
  source 1..112: mol_type = other DNA
agagcatcggtctccaaaaccgttgatgcgggttcgattcctgcagcccctgccagttgattatgagtcttggaaacaagacttttttctttttctaaaagaggtggaactg

SEQ ID NO: 1983 - DNA, 103 bp, synthetic construct
  source 1..103: mol_type = other DNA
gcacaaggctctactctatggccaacagctttaatcacagtaaacttaaaaaacgtatcactatgatgttaaaagaaaaatcgaatccgtgggcacggttgaa

SEQ ID NO: 1984 - DNA, 110 bp, synthetic construct
  source 1..110: mol_type = other DNA
aaaggattagaaattatggaaggtctgcgtggtcatacatcagggtacgccgtacctacctttgttgtggatgctccaggaggaggcggaaagatttctgttcagccaaa

SEQ ID NO: 1985 - DNA, 117 bp, synthetic construct
  source 1..117: mol_type = other DNA
ctgcacaaccattaacagtttcaactcaggagacaacaatgagcatgtatgcaacgcttgaagaagctattgatgccgcccgcgaagaattccttgaagccgcgcaggataggatcc

SEQ ID NO: 1986 - DNA, 111 bp, synthetic construct
  source 1..111: mol_type = other DNA
gatcatccgtatgacgagatcaacgtcctgacgcaggggcgccattacggctggccctattgcgtcgatctggtcacgcccctgcccggctggccagcgcgtcaggcgcgc

SEQ ID NO: 1987 - DNA, 108 bp, synthetic construct
  source 1..108: mol_type = other DNA
gatccgccgcttctgtcagattcccagtggtcatgactgcatggaaaatctcgatgtgtcgtagggatactgccgccatgtcgcttccttcatttatttttataaacc

SEQ ID NO: 1988 - DNA, 102 bp, synthetic construct
  source 1..102: mol_type = other DNA
caagaaatgtattgattattgtaggtgcaacataccaccagattgggtagccgacaaatacagtatcgtactgctcaatattatctacatggcttgcgattg

SEQ ID NO: 1989 - DNA, 105 bp, synthetic construct
  source 1..105: mol_type = other DNA
tagcgaaattgacaaaaaaacaagactattgggaacgttggtttaattgttattctcagaaattttccgaacagctacaaaagcatcagggtgaaatcttagggg

SEQ ID NO: 1990 - DNA, 103 bp, synthetic construct
  source 1..103: mol_type = other DNA
cccaggcgggcggcgccgatgagcgcggccagcacgacggcgacattggacccgctgaccgcgctcaggtgcgacatgccgacgaggagcatgtcgtcggtga

SEQ ID NO: 1991 - DNA, 106 bp, synthetic construct
  source 1..106: mol_type = other DNA
gccctgatccgctcccggttgtcgtacgtcatcagcggcgggacgggcaccgggaagaccacgctcctgagcgcgctgctcggcctggtcgaccccggcgagcgga

SEQ ID NO: 1992 - DNA, 103 bp, synthetic construct
  source 1..103: mol_type = other DNA
ccgtgaacctctcgccggcgagtcttcccaaacgcgggtcggggttcgacgtggccatcgccgtggccgcactggcgacgaccacgcgcatggatgccgcccg

SEQ ID NO: 1993 - DNA, 103 bp, synthetic construct
  source 1..103: mol_type = other DNA
cgagaagccaacatggtttttccagttccgggcgggccgagaaaaaggaagttatggttgcccgctgcggcgatctccaatgctcgcttaccttgctgctggc

SEQ ID NO: 1994 - DNA, 111 bp, synthetic construct
  source 1..111: mol_type = other DNA
tagcacctatcttattggcattgattggtgcgttaaatactccacctgtagtagatacgtgtgccccaacaaatttatttatctttctattttccattaaataattctcct

SEQ ID NO: 1995 - DNA, 112 bp, synthetic construct
  source 1..112: mol_type = other DNA
aaaaaagagcaatttctgctctcgtatctatcggtaattttaattttcaaatggtgcgaaaggtgggactcgaacccacatgtcgaagacgctagatcctaagtctagtgcg

SEQ ID NO: 1996 - DNA, 102 bp, synthetic construct
  source 1..102: mol_type = other DNA
cccggtagatctcccgaggctccagcacgcagaactcgttgccctccgggtcggcgaggaccatccacggcacgtcgccctggcccacgtgggcgggcgtcg

SEQ ID NO: 1997 - DNA, 110 bp, synthetic construct
  source 1..110: mol_type = other DNA
aattcttcatttgttctatttttttcatctcaaaagaccccctctcatcccatatgtatgaaaaaagagcttgtaatatcacgtccaaactgaaaaaagcataaaaaaac

SEQ ID NO: 1998 - DNA, 102 bp, synthetic construct
  source 1..102: mol_type = other DNA
catctactgcatccatcaactccttttcattctccggatcaacatttgccgttgcttcatccaatatgacgattggcgcatccttcataatcgctctggcta

SEQ ID NO: 1999 - DNA, 102 bp, synthetic construct
  source 1..102: mol_type = other DNA
aagctggttttactttaattgagatgcttatagttttgttaattatatccattcttattttaattacaatcccaaatgttacaaagcatttcgccacaatag

SEQ ID NO: 2000 - DNA, 105 bp, synthetic construct
  source 1..105: mol_type = other DNA
caaattcttgctcaaattcgggacgtaattcattaggaatcaaatggagaggttcttcttgcatagggcagccgtctagcgcataaattgaaccttcatctgtac

SEQ ID NO: 2001 - DNA, 108 bp, synthetic construct
  source 1..108: mol_type = other DNA
tcttagataaagtcgatgaatttcttaaagcatatattacttcggcaccgtcgccacctcctgcatttaagtgattagatattactataacatctttaccatcaccat

SEQ ID NO: 2002 - DNA, 105 bp, synthetic construct
  source 1..105: mol_type = other DNA
gcggcgccagggaagggttagacgcggtctagagataagccgcacaacatttcttgaatttcagaccgctgccgcaggggcagggatcgttgcgaccttccttga

SEQ ID NO: 2003 - DNA, 102 bp, synthetic construct
  source 1..102: mol_type = other DNA
ccgtgttgcccactaagggttaaccgcgacaaaacaaaaccccggccaggcaactggtcggggttttgtgttttcagccctggcaatgccggcggttatgcc

SEQ ID NO: 2004 - DNA, 110 bp, synthetic construct
  source 1..110: mol_type = other DNA
acatgttcaaaattgcgatttcctgccatatggtccggcaaaaaggatgtccttgatgaatctcaacacgccgcaattttccgatttttcccatgacggtcttcgccttg

SEQ ID NO: 2005 - DNA, 111 bp, synthetic construct
  source 1..111: mol_type = other DNA
atccgccaatacatctcaactattagtccttccttaccaacagtgagcaacactccacatgtgtcgtatgctgtaacataatattttagtacgctactattagatgatatt

SEQ ID NO: 2006 - DNA, 102 bp, synthetic construct
  source 1..102: mol_type = other DNA
cactggcctgcccaccgcaagcgagcaactttccgcggcgcaatcgcatcatcagcggcctgtcgctgggcgtgctggtggtcgaggcaagcccgtcgagcg

SEQ ID NO: 2007 - DNA, 116 bp, synthetic construct
  source 1..116: mol_type = other DNA
gctatttctaaaatatatggacatccagtccagttcgtagaccatcagcatgatagaagttgttgtgttgaagaagaagccataagcgaatagacaaaaaatattgcgcattacaa

SEQ ID NO: 2008 - DNA, 103 bp, synthetic construct
  source 1..103: mol_type = other DNA
tcagataggtcacggtctcgaagccccggtgggggtgccagggcgtgcccttgggctccccgggggcgtactccacctcgcccatctggtccatcatgatgaa

SEQ ID NO: 2009 - DNA, 102 bp, synthetic construct
  source 1..102: mol_type = other DNA
gatgctagtcaattgataacgctaacgagaactgcgacattagatgaagtaacagggaaggtgattaagtatagtaactggacaattggtagttttagtgaa

SEQ ID NO: 2010 - DNA, 113 bp, synthetic construct
  source 1..113: mol_type = other DNA
tccgaacacgggacggggcggagcgcaggcccggagcgtactgcctagtccagcggaccgccggcgacgtagaggacctggcccgacacgaacccggcctcctcaccggtgag

SEQ ID NO: 2011 - DNA, 102 bp, synthetic construct
  source 1..102: mol_type = other DNA
aaacttctgacaatacctttccgccaactggtgcagcaacagcacctccttggtgtcctccttctcctgttgggttatataatgttacaagtattaccactt

SEQ ID NO: 2012 - DNA, 104 bp, synthetic construct
  source 1..104: mol_type = other DNA
gcacgcccaccacctgcggcactgggaagacggcggccccaccgaactgtccaacctggtcctggtctgcccctatcaccaccgcgcccaccaccgcggcgaga

SEQ ID NO: 2013 - DNA, 111 bp, synthetic construct
  source 1..111: mol_type = other DNA
ccgcgggccactgttcgtcacggtcgtgccggtgacggtcggcgcattccaggcaactggtgataccgggcagcaccatgggcccgatgaggccggtgccgtcgcgggcgc

SEQ ID NO: 2014 - DNA, 102 bp, synthetic construct
  source 1..102: mol_type = other DNA
accccgatacgaagcccccctgcggttcgggggtgcttgtcaaggcatctttcccgccttgacaagcacccccgaaccgtcagcacactcaagcttcggggt

SEQ ID NO: 2015 - DNA, 106 bp, synthetic construct
  source 1..106: mol_type = other DNA
atctgagcagacaggttttcttcctgttttaccgtttagaaaagcagctgaccatccgccagctgctttttcacttcttctttttgggtggttccccctgtaacac

SEQ ID NO: 2016 - DNA, 104 bp, synthetic construct
  source 1..104: mol_type = other DNA
atatcatctttctatcagataggttaaaaataatatctaaaattttcataccacctctactacttatacatcagtgatagatagtcatttatatatttagtgag

SEQ ID NO: 2017 - DNA, 108 bp, synthetic construct
  source 1..108: mol_type = other DNA
acggacccgcgaccggtggggtcacgcagctgttcaccggcgactgcctgttccccggcggcgtcggcaagacgtggcagcccggcgatttcgaccagctgctcgacg

SEQ ID NO: 2018 - DNA, 105 bp, synthetic construct
  source 1..105: mol_type = other DNA
cagccaaggctttgcgcgccgcgtactgtagcatgggattgttatgatacgggaaagcatcgagttcatcgataatggccatgtcaaaatatccgtgaaagcgaa

SEQ ID NO: 2019 - DNA, 108 bp, synthetic construct
  source 1..108: mol_type = other DNA
aagtgttaactccgcacttggtcaaaacaaaatttggctggcatgtggtcaaggttctctacagaacatagcctctacccagagatcatgagctgactttcgagtttc

SEQ ID NO: 2020 - DNA, 107 bp, synthetic construct
  source 1..107: mol_type = other DNA
cattcttttaagcattcctgaaagtttttctgaatcttcttcattcatttgacatccatacgtttgaataaagaagtatttttattttttgttcttctaattgttct

SEQ ID NO: 2021 - DNA, 102 bp, synthetic construct
  source 1..102: mol_type = other DNA
cctgggcgtccacaccgtcaacggtatcaaggtgcgcacccgtgccaccatgggccgctgccagggcggctactgcgagacccgcatcaccgaggccctccg

SEQ ID NO: 2022 - DNA, 108 bp, synthetic construct
  source 1..108: mol_type = other DNA
accctgaaatcactgtatactttaccagtgttgagaggtgagcaatgcgtaaaatcattcatgtggatatggactgctttttcgccgcagtggagatgcgcgacaatc

SEQ ID NO: 2023 - DNA, 102 bp, synthetic construct
  source 1..102: mol_type = other DNA
gagtgagaagcgcgatcatcaattctcgctttgagtttccatcgaaaagaattacggttaatctcgccccagccgatttgcccaaagaaggtggccgttttg

SEQ ID NO: 2024 - DNA, 100 bp, synthetic construct
  source 1..100: mol_type = other DNA
gcgatattctccacgtcagcggacagcttttaaactccgatactttggacatatttgtcgtgcattttccgtcccgttccggcggggcaaaagcgtccga

SEQ ID NO: 2025 - DNA, 105 bp, synthetic construct
  source 1..105: mol_type = other DNA
ctataaatggatttagtgatagtggcttagcagtagttgatatattagatggagaatcaaaatatatgtctgttataaatactaagggtgaagaaattaaaaatc

SEQ ID NO: 2026 - DNA, 103 bp, synthetic construct
  source 1..103: mol_type = other DNA
ggaaggaggactgctcccattagcgccacggcaggtgatggccaaaaaaaccacgaaataaccatcattaaaattccgatcgtccaataagccagtgcaggtg

SEQ ID NO: 2027 - DNA, 103 bp, synthetic construct
  source 1..103: mol_type = other DNA
acacagctttaataggtcacctaactcgccgctcggccagccttttttatcaaaccacagcaaatattcctcaggtaaatcaataagtactctgcctgcatat

SEQ ID NO: 2028 - DNA, 102 bp, synthetic construct
  source 1..102: mol_type = other DNA
aatcaaaacgaccaccttctttaggtaaatccgccggggccaaattgaccgtaatgcgcttggctggaaactggaaatttgaattgatgatcgcactacgta

SEQ ID NO: 2029 - DNA, 107 bp, synthetic construct
  source 1..107: mol_type = other DNA
ggtccggcgcacacatcgccatgggcaccaacgtcgactgctaccagcgcgccgagggccgctaccggctgatgcccgggatcatcgaggcgctgcgcgaccacgcc

SEQ ID NO: 2030 - DNA, 103 bp, synthetic construct
  source 1..103: mol_type = other DNA
ctttaagaagcatcgccccgccgccgctgccgttcactgttttggacgggcagccgcagttgagatccaccccgtgcgagccgagttccgccgcacgtgcggc

SEQ ID NO: 2031 - DNA, 107 bp, synthetic construct
  source 1..107: mol_type = other DNA
agcactcaaaatgctgcgactcgcgtcatgtcggttcgagtccgacctcgggcaccaagatataaatgagctttaaagatatttctttagagctttttattttgaca

SEQ ID NO: 2032 - DNA, 107 bp, synthetic construct
  source 1..107: mol_type = other DNA
aggaaggaaacttcaaggcaggtcgttttgcccttatttctgcagatgaactgattgttgcgcatacaaacgaatcggagtacaaggcttttattgcgaataagaaa

SEQ ID NO: 2033 - DNA, 104 bp, synthetic construct
  source 1..104: mol_type = other DNA
cggcggtggcgatgcgtttttgccggcccaggtacagcggccgtttgaggtggtcgtcgaagaccgccagatagtggatgccggtggcggccatgcggatcaga

SEQ ID NO: 2034 - DNA, 107 bp, synthetic construct
  source 1..107: mol_type = other DNA
catcgccgggcagttatttattagcgaaaaaacggtgcgtaaccacatctccaatgtgatgcagaaattgaacgtaaaaggacgttcgcaagctgtcgttgagttga

SEQ ID NO: 2035 - DNA, 104 bp, synthetic construct
  source 1..104: mol_type = other DNA
caggccgggatactttgggaatcatgcctaccggcgccggaaaatctttatgctttcaggtgccggcattaatgatgaagggaatcacattagtcatatcgcca

SEQ ID NO: 2036 - DNA, 101 bp, synthetic construct
  source 1..101: mol_type = other DNA
cggctgtcacggtggaggtccatttggccaacggactgccttcgttcacgctggtgggcctggcggatgtggaggtcaaggaggcccgcgagcgcgtgcgc

SEQ ID NO: 2037 - DNA, 112 bp, synthetic construct
  source 1..112: mol_type = other DNA
gtcccggggagtggtgtaagtgatggcggcgtgtcggtccctgacgtaagagggccatcgcgatgttcctctcggtagtgattcttggtcgtttcaccacagagactcacgc

SEQ ID NO: 2038 - DNA, 108 bp, synthetic construct
  source 1..108: mol_type = other DNA
agttcgctttctcaatcacgaagttattaagcaaagccatccaactcgaaaacgcgatcggtacaacaatcgaaatcagtaataaaaagttttgcggcgttttccagc

SEQ ID NO: 2039 - DNA, 116 bp, synthetic construct
  source 1..116: mol_type = other DNA
tccgcctgaactctatgaagtagttgcagagatccttgtgtttgttgatgccatggataagatcaaagcaaaggataagaccaggtgagtagtaaagaaataggaaaatggtatga

SEQ ID NO: 2040 - DNA, 102 bp, synthetic construct
  source 1..102: mol_type = other DNA
gattgtcaacagaagtgactaactttccgggaatgccaaggaggagagcttttggtcaagcttttcgcgaaaagcttgcggggagccacagtcagcaaggct

SEQ ID NO: 2041 - DNA, 105 bp, synthetic construct
  source 1..105: mol_type = other DNA
aagtgttaactccgcacttggtcaaaacaaaatttggctggcatgtggtcaaggttctctacagaacatagcctctacccagagctcctgagctgactttcgagt

SEQ ID NO: 2042 - DNA, 103 bp, synthetic construct
  source 1..103: mol_type = other DNA
agaatgacattatccaacagaaaacgattttcaaaggatcactgaatcaaagtattgctcatccacgcgaaatttttcgggaagcggttaaatattcttctgc

SEQ ID NO: 2043 - DNA, 109 bp, synthetic construct
  source 1..109: mol_type = other DNA
tcggggagctcctggacccgatcacccaggacgtctgcgccttctacgaggaccatgccctctacgacgcctacacgggcgtggtggtggacgaggaggagggccgccg

SEQ ID NO: 2044 - DNA, 115 bp, synthetic construct
  source 1..115: mol_type = other DNA
aatgggcaaaagagaaaggtcgtcgtcctgtcatggggttatgtacattcgggtgtcagatgaatgagcacgactcagaagaactagcatatatgcttgaaagaatgggatacga

SEQ ID NO: 2045 - DNA, 105 bp, synthetic construct
  source 1..105: mol_type = other DNA
agctccagaagtgacggttgaagttcacatcagcaacggaatgccagggtttacgttggtaggattaccagaaactactgtgaaggaatctcgagatcgggttcg

SEQ ID NO: 2046 - DNA, 150 bp, synthetic construct
  source 1..150: mol_type = other DNA
cgtaagccaaccgcggtgtgagttggaacataccggtgacgagccggtattgatgcggggtagagcagtctggcagctcgccgggcccataacccggaggccatgggttcaaatcccatcctcgatattaagcattcggccataaagttg

SEQ ID NO: 2047 - DNA, 108 bp, synthetic construct
  source 1..108: mol_type = other DNA
tagctagagcattaaaaggaactcctcctgctgattgtggatatacatctacaccatggtctgtgtaatatgcccctaatcctgctgcttttatttcatctattgttg

SEQ ID NO: 2048 - DNA, 110 bp, synthetic construct
  source 1..110: mol_type = other DNA
aaacgtggccagcagtgagatctacgcaacttggccggaggacacgatacgtgccaatgttctggcaatcatgtcgtttactctgaacagagtttatacagagtggtacc

SEQ ID NO: 2049 - DNA, 105 bp, synthetic construct
  source 1..105: mol_type = other DNA
ccccgccggtgacggtcgaggtgcatctggccaatggcttgccggccttcaccatcgtcggactccccgaggccgaggtgaaggaagccaaggaccgcgtccggg

SEQ ID NO: 2050 - DNA, 102 bp, synthetic construct
  source 1..102: mol_type = other DNA
aatggacaactaggtcaatgcatgcggctaccgtcttgatggtgaagtcgctggtgatgttcggtccggcaagcagaggcaaggtgcaaattttcgtgatcg

SEQ ID NO: 2051 - DNA, 102 bp, synthetic construct
  source 1..102: mol_type = other DNA
catcaccgatccccggctgctgtccgccaccggcggcatcgtgcaggggatgagcggcagccccattcttcagaatggccgcatcgtgggcgcagtgaccca

SEQ ID NO: 2052 - DNA, 108 bp, synthetic construct
  source 1..108: mol_type = other DNA
agccgatccttacgcagtattgtgatgggaagaaggtgtcttgtccggaatggatgacgcagtggggttctaaatacttaggcgatcagggatatgctccgattgaga

SEQ ID NO: 2053 - DNA, 115 bp, synthetic construct
  source 1..115: mol_type = other DNA
agcccgcacgatcccgcgaacatccgcatccgcgtcgacggctgagtgggcagggggcgctgccccctttcccttggccgttctcgtcggtcacaacgtcgtgtcctcaccggca

SEQ ID NO: 2054 - DNA, 110 bp, synthetic construct
  source 1..110: mol_type = other DNA
actcccccttccggtactcaggtaaatgcaatgatatggactcaattgcgtcatcaattgggtaccccctggctaaaagctcaccaattctttttagaaagcttgcctgt

SEQ ID NO: 2055 - DNA, 103 bp, synthetic construct
  source 1..103: mol_type = other DNA
cgaaaaattgaaagtgcacttccaaaaccaatcccaatttcatgttttaaaattaggatttgaaaatcgactgggaacattatcaacttgggatgaattgaaa

SEQ ID NO: 2056 - DNA, 102 bp, synthetic construct
  source 1..102: mol_type = other DNA
aaagcacctttctcgccaccatgagccatgaaatccgcacgcccatgaacgcggtgatcggcatgcttgaactggcactcaaacgcgctgatcacggcgagc

SEQ ID NO: 2057 - DNA, 102 bp, synthetic construct
  source 1..102: mol_type = other DNA
gcgttccggtcgacgtccaggtgatggttgcacccggcaaggtcggtatgcagatcgtcggactgccggacaaggcggtggccgaaagccgcgagcgcgtcc

SEQ ID NO: 2058 - DNA, 102 bp, synthetic construct
  source 1..102: mol_type = other DNA
gcattgcaaatcgttgactcagatatcgtaatgacgcacccaactcaccgtccggaccgccgtatggcagagtgttacttattttgactgagaaatatgttg

SEQ ID NO: 2059 - DNA, 108 bp, synthetic construct
  source 1..108: mol_type = other DNA
ttcgacgactcttcgcaccatatttagcggggctactgccattggcgggccgtatgtgtatccccattcataagtcatcagcagaacccggtttgccgccgctcccaa

SEQ ID NO: 2060 - DNA, 108 bp, synthetic construct
  source 1..108: mol_type = other DNA
aatttcaatatacaacaatttataaagttataagaacttactgtatattataccattctagagcatatcgacagtaaaaaaacacatgatacaaggtgtatactttta

SEQ ID NO: 2061 - DNA, 105 bp, synthetic construct
  source 1..105: mol_type = other DNA
aaaaataacttattgaaatgataggagagaagaaagaatcaaatttttgatataatagtttcatgaaaaatattgttactgcaagggcgcatacaaatatcgcct

SEQ ID NO: 2062 - DNA, 104 bp, synthetic construct
  source 1..104: mol_type = other DNA
aagtacccaagcaaagcagttttgagcaatgggaagtggtcgtgtttgagagtgaccaagttaacgcgtttgccttgccgggtgggaaaattggggtatacacg

SEQ ID NO: 2063 - DNA, 105 bp, synthetic construct
  source 1..105: mol_type = other DNA
ccacttggcgcacattgggcaggggagccactgccatcggcggaccataggtatagccccactcataggtcataaggagtacctgattaactgccgcaccgatgg

SEQ ID NO: 2064 - DNA, 102 bp, synthetic construct
  source 1..102: mol_type = other DNA
catcgtaggctggaaaaccgcgcagcgttttccagcgcatcgctttagaagcagccctttcaaggtgtttgcgtaaactctcccaaggatcaagcgggaggg

SEQ ID NO: 2065 - DNA, 106 bp, synthetic construct
  source 1..106: mol_type = other DNA
cgcgtgcgtcgtccacgcgggcccaggggccaggtcaggccttgggtgccaccttgctgaggccgttgatgatgcggtccatcgcgtcgccgccccgcgggtccgt

SEQ ID NO: 2066 - DNA, 114 bp, synthetic construct
  source 1..114: mol_type = other DNA
cggaatccgtcacctactggctggacaaggcgcccgaagtcgatctgaattccatcaagatcgaagtgcccgccttcggcaatcagggtggcaacaccatgcccaatttcagcc

SEQ ID NO: 2067 - DNA, 105 bp, synthetic construct; identical to SEQ ID NO: 1357
  source 1..105: mol_type = other DNA

SEQ ID NO: 2068 - DNA, 102 bp, synthetic construct; identical to SEQ ID NO: 1245
  source 1..102: mol_type = other DNA

SEQ ID NO: 2069 - DNA, 104 bp, synthetic construct
  source 1..104: mol_type = other DNA
cggcaaacccttccagtgcgtgatcggcaccggtcgggtgatcaagggttgggacatcgggctgatgggcatgcgggtcggcggcaagcgccggctgttcgtgc

SEQ ID NO: 2070 - DNA, 102 bp, synthetic construct
  source 1..102: mol_type = other DNA
aaaattcacgcctgcaggtttcagcagaagactcacccagctccatagcacctcccggaattgcccaggttttcttatctgcacgtagctgcaaaagcacct

SEQ ID NO: 2071 - DNA, 111 bp, synthetic construct
  source 1..111: mol_type = other DNA
tggtgctgctgcccgacagcggccgcggctacctgagcaagatcttcaacgacgagtggatggccgactacggcttcctggaggacaccagctcctccccgcaggtcagcg

SEQ ID NO: 2072 - DNA, 109 bp, synthetic construct
  source 1..109: mol_type = other DNA
ctgccatattgttcatcgctactggaataagggttatcccaataatggtgacgacagatcctgtcacgacaggtgggaaaaatctcacaagcttcccaaagaaaaagga

SEQ ID NO: 2073 - DNA, 102 bp, synthetic construct
  source 1..102: mol_type = other DNA
gccctaatcccgcttcctctaattcacataccgaagcatcctttgtcagcttgtagatcatcgtggcaatcatctcaaggtgagcgaattcctcagtcgaaa

SEQ ID NO: 2074 - DNA, 108 bp, synthetic construct
  source 1..108: mol_type = other DNA
cctccactgattttgcgtgctaccataaaaatgcaagccagaaaatccaagcgaacgccagccaccaccaccaccagccgccgtaccacgcgccataacctgggtaac

SEQ ID NO: 2075 - DNA, 120 bp, synthetic construct
  source 1..120: mol_type = other DNA
aaattgctaagcgtgataacaagccaattttcttgtcgattggctattcgacttgtcattggtgtcatgtgatggagagagaatcttttgaggatcaagaggtagctgaggtattaaatc

SEQ ID NO: 2076 - DNA, 113 bp, synthetic construct
  source 1..113: mol_type = other DNA
cactgatttcagtcgattttagattcttctcacccaacagcgctgatttcactttagtcgtgaccacagtgtcatccagataacccccggttccttccgattttgctgtagga

SEQ ID NO: 2077 - DNA, 103 bp, synthetic construct
  source 1..103: mol_type = other DNA
agctgcctgagtttgatcgccgtgtactggaggttctacgtgagccgctggagtcggggcatatcgtgatttcccgtgcgcgggatcgcgtgcgctttccggc

SEQ ID NO: 2078 - DNA, 103 bp, synthetic construct
  source 1..103: mol_type = other DNA
gagacgttggtaccacatctggtaaaaacaaaatttggttggcacgtggttaaggttctttacagaacctagtgtaagatatgtgtgcaatggaataaaagga

SEQ ID NO: 2079 - DNA, 118 bp, synthetic construct
  source 1..118: mol_type = other DNA
ggttgagtgccagcgagatctggcagtggatgttggcccgcagggcctgctccggccaggtagggtagacttcgctggatgcaacattggcgatatagtcccggaaggagacagtcac

SEQ ID NO: 2080 - DNA, 110 bp, synthetic construct
  source 1..110: mol_type = other DNA
agcatatcgctgggacagataacgcatggatgcgcccatttccccgtcaggaccgccatattgtgatatgattgcctgtgccagctttgcatttgtctccttgatgttca

SEQ ID NO: 2081 - DNA, 145 bp, synthetic construct
  source 1..145: mol_type = other DNA
ccctccagacccatagttggacttagttgatcttgttggaaacgtcgctggagcgggtgaagggaatcgaaccctcgtattcagcttgggaagctgctgctctgccattgagctacacccgcgcggggttgaaggtctgatagtt

SEQ ID NO: 2082 - DNA, 108 bp, synthetic construct
  source 1..108: mol_type = other DNA
aggaccaggcgatcgccgcggccgacaccctcctcgtcacgatccccaaccagctcggcgtggacttcaacctgcggtcgctcgcggcgatcaagcagatcggggagg

SEQ ID NO: 2083 - DNA, 108 bp, synthetic construct
  source 1..108: mol_type = other DNA
acgcgatcgggacgatcgcggcggcggcattcggtgcggtgctgtacggcgtggtcaccggcgacaacatcgtcagcggcctcacgtcgatcatcgggaaggcgctgg

SEQ ID NO: 2084 - DNA, 108 bp, synthetic construct
  source 1..108: mol_type = other DNA
gatataaattatgagtaacgagcgatcaaaaatcgtgagtttccatactctaggttgtaaagtaaaccactacgaaacagaagccatttggcaactatttaaagatga

SEQ ID NO: 2085 - DNA, 102 bp, synthetic construct
  source 1..102: mol_type = other DNA
ccgcatacatagcacccagcgtgtaactagggaagtagccaaagcttccatctgtccagtggatgtcttgcatacagccgttttggtcatttccttgggtag

SEQ ID NO: 2086 - DNA, 107 bp, synthetic construct
  source 1..107: mol_type = other DNA
ctgcggcagcagcggcgccgacgggtccaggaactgcgggagcactgcgagcatgaaaacgacggccttcggattgctcgcgttcacgagaaatccgcgaagcatca

SEQ ID NO: 2087 - DNA, 103 bp, synthetic construct
  source 1..103: mol_type = other DNA
aacattagcttcccaagctgaatgggtgggttcgactcccattgtccgctccaattataaaagccgctttttaagcggcttttctttgtttatgcgtgtttgc

SEQ ID NO: 2088 - DNA, 104 bp, synthetic construct
  source 1..104: mol_type = other DNA
cagaaactcataatcgttttttagggaatcatggtgggtgtcgaatagattttctacattccagcacattacgcggaaagggggggaatcggcttgagcggtga

SEQ ID NO: 2089 - DNA, 109 bp, synthetic construct
  source 1..109: mol_type = other DNA
ggtgttgataatctactttgtgggggagaaaaatcaggattgtttgttggtcatacagaagctatatgtacaggatcattagctggtcataatgcggtaaggcaagtta

SEQ ID NO: 2090 - DNA, 102 bp, synthetic construct
  source 1..102: mol_type = other DNA
ccagacggctgatcatatccgcaggcccgttgctgtggccggtggacaaggagccgtcatgccctgtgttcatcgcctggagcatatccagcgcctccgccc

SEQ ID NO: 2091 - DNA, 103 bp, synthetic construct
  source 1..103: mol_type = other DNA
accgtggtggacgcaccctcgaacgcaacctgaaaccactctgccggtttcaccaccggatcaagaccttcaccagctggcaggactaccaggacgagttcct

SEQ ID NO: 2092 - DNA, 121 bp, synthetic construct
  source 1..121: mol_type = other DNA
catatttgattttttcagaaacttctcttcttgctttggccatatggccgggaaaccattgtatggtcataatctgttcaaatcccttctttaacacactgtttctttgattcaattcttc

SEQ ID NO: 2093 - DNA, 102 bp, synthetic construct
  source 1..102: mol_type = other DNA
gcgataaagcacgtcttgcatcaaaacttgcttaattaaaaaagaaacctcttgggtttcctttttttattttttccatcataaggaggcgggacaaagtgg

SEQ ID NO: 2094 - DNA, 113 bp, synthetic construct
  source 1..113: mol_type = other DNA
ctgtaaagatgctcagcgatacttagatgaaaagggctatgcctacagattaaccaacgcaaaaatgcagcgtggcagaaaagaactggatgctattggagcacgctctttac

SEQ ID NO: 2095 - DNA, 105 bp, synthetic construct
  source 1..105: mol_type = other DNA
aagtatatttttcaaccggacaaacggccgcttatttgttgttcagagccgcctgagctgctgccagacgagcaatgggaacgcggaatggtgagcaggagacat

SEQ ID NO: 2096 - DNA, 102 bp, synthetic construct
  source 1..102: mol_type = other DNA
gtgatccaggccccaccggcccgacggggcccactggcctgacgggtgcgacgggtccgacgggcccgaccggccccaccggcgccgtgggtctgacgggcg

SEQ ID NO: 2097 - DNA, 108 bp, synthetic construct
  source 1..108: mol_type = other DNA
tcatcagctcggcggtggccggatcggcgaacgattcgtgcgccatcacatgacaccagtgacacgaggcgtaaccaaccgacagcaggatcggcacgtcccgcgctc

SEQ ID NO: 2098 - DNA, 117 bp, synthetic construct
  source 1..117: mol_type = other DNA
tgacgaactccgccattgagctgaaagtgcttatcgaacaaatgcgcgagcagatccaaaacatcgagtaacggtttcccgcccgccacatcacgttcggacaaaaggccatggtaa

SEQ ID NO: 2099 - DNA, 102 bp, synthetic construct; identical to SEQ ID NO: 1690
  source 1..102: mol_type = other DNA

SEQ ID NO: 2100 - DNA, 105 bp, synthetic construct
  source 1..105: mol_type = other DNA
acttcatcggagcgcatgatcacgacgaggagcccggcgaaggcgaccgcggccatcgtggtgatcgcgtattcggctgtggccgccccggtgtcgtcgccgaac

SEQ ID NO: 2101 - DNA, 109 bp, synthetic construct
  source 1..109: mol_type = other DNA
cttttgtctttgacattcctccatttttcataggaacagccatcgatattccttctggtatatcatgtaaacaaattgcaattgccaaaccaagtcccaaacgcataga

SEQ ID NO: 2102 - DNA, 106 bp, synthetic construct
  source 1..106: mol_type = other DNA
atctgtccgcccaatcggcggcagaatgtaagctgacggaattcggcttgatcaatatggatgaatttgataagtttactcctcgcaagatggcattgttgaagaa

SEQ ID NO: 2103 - DNA, 114 bp, synthetic construct
  source 1..114: mol_type = other DNA
cccacaacttgtgggaaccccggtttctctttttcgttctgactcagccgatgaacatcgcatctccaaaggagaaaaaccgatagcgctgctccaccgcctccttataggcgg

SEQ ID NO: 2104 - DNA, 103 bp, synthetic construct
  source 1..103: mol_type = other DNA
ctccagttaactgcgatcagagcacaaggagccggcggccaaaacgtcaataaagtatcgagcgcgatacatttacgttttgacatcaagcactccaccctac

SEQ ID NO: 2105 - DNA, 103 bp, synthetic construct
  source 1..103: mol_type = other DNA
ctacattaacagcactcgggcaaattgctgccatatggaccggaggcgggactttaattccttgggcgcttattcctgccgctgccatttgtaaagtggatcc

SEQ ID NO: 2106 - DNA, 103 bp, synthetic construct
  source 1..103: mol_type = other DNA
ccgggagtcgcgcaggagtgcgtggagaccaaggacggtctgcacatctgggaggaccacttctacccggagatcgtggacccgttcacgggcgaggtgctgc

SEQ ID NO: 2107 - DNA, 108 bp, synthetic construct
  source 1..108: mol_type = other DNA
agcctgcttttactggcatcatttcaatgcccgttgggttccccgcaatcgcccaacctgtctctgtttgccaccagtgatcgataactggtttgtccgttttacttt

SEQ ID NO: 2108 - DNA, 103 bp, synthetic construct
  source 1..103: mol_type = other DNA
ctaccgcatacttacgaattaaaaacatggcactttgcgccgcttttaattcacatattaagtgatcaattaatatgatgggtaagttttcttttttgattgc

SEQ ID NO: 2109 - DNA, 105 bp, synthetic construct
  source 1..105: mol_type = other DNA
tcattgtatttgcctgaagctaagtcatttgaatatatacccatcgcctttcaagttgctacgttgttgtcagcgttcgctcaccccgatcacatactatctgta

SEQ ID NO: 2110 - DNA, 109 bp, synthetic construct
  source 1..109: mol_type = other DNA
agctgatagagtattgcacttatcatctccatgtgcgccagttcttcagtacctatatctgtcagcattgcctgaacttcccttgtgggcgcagaatatctctgactga

SEQ ID NO: 2111 - DNA, 114 bp, synthetic construct
  source 1..114: mol_type = other DNA
tttttaaaatatgaacaagcttgcgaaaatgcaatcatttcagtagtacatacgggggtaaaatctccaggatgagaaaataatacaagccattttcctttgtaatcgcttaac

SEQ ID NO: 2112 - DNA, 102 bp, synthetic construct
  source 1..102: mol_type = other DNA
ctgatggagattttaattgggataaagtgaagggctctaccttccttggtcaaagaaaaggcggaatgccacaaatggcaggcgcgtttactttatctaaaa

SEQ ID NO: 2113 - DNA, 102 bp, synthetic construct
  source 1..102: mol_type = other DNA
atattgagcaggcgttgatccaggtctgtaagtccagtgccagcaacagcatgatagcgttttccaataccctgcgtgagtaccggatcaatgaacagcgag

SEQ ID NO: 2114 - DNA, 105 bp, synthetic construct
  source 1..105: mol_type = other DNA
caccgccgaagcacgagcagattgaacggggtacttcatgcagcgcgcagcagcagcagttgcagctggtttccggcgcaaccacacgcgcgtccagcatgatcg

SEQ ID NO: 2115 - DNA, 105 bp, synthetic construct
  source 1..105: mol_type = other DNA
taaagcctaacattatgcagatgcacagctcttatgtgattactgatccgaagggaactgtgcttctggaagttggcagtatgctggcaaaaggcagtccgatga

SEQ ID NO: 2116 - DNA, 107 bp, synthetic construct
  source 1..107: mol_type = other DNA
acgcctcgacctggcgtcggctctggtcttccgaccgccggtggtcatcctcgacgaacccaccaccggcctcgacccgcgcggcaggctggacacctgggacgtca

SEQ ID NO: 2117 - DNA, 102 bp, synthetic construct
  source 1..102: mol_type = other DNA
tcaatcatggactttggctcgttgctcgcgtaaataaaaaaggacacctctttggtatcctttttcatctttctaaatgcagtttaaattcatgctgcccca

SEQ ID NO: 2118 - DNA, 112 bp, synthetic construct
  source 1..112: mol_type = other DNA
actaaaaaaaacctctgacagaggtttttattttcattatcctaaaacttttttaatatcttctgttacttggctaatttcttgttcaccttcaatgtttttaacaagtcca

SEQ ID NO: 2119 - DNA, 108 bp, synthetic construct
  source 1..108: mol_type = other DNA
aactgccggagttcgagcgcaaggtcctggaggtcctgcgcgagccgctggagagcggcgagatcgtcattgcccgggccaacggccgggtacgtttcccggcgcgct

SEQ ID NO: 2120 - DNA, 107 bp, synthetic construct
  source 1..107: mol_type = other DNA
ggtggttatgggtgaggatgacggcggcggcattgttggccaacgaacgcttgaccacctgcctggggtagacactggcactgtcgatgctgccgcgaaacaacacc

SEQ ID NO: 2121 - DNA, 107 bp, synthetic construct
  source 1..107: mol_type = other DNA
ccggattgactgagttcacacgaattttcttcggcccgagttcgcgtgcgagcacgcccgtgatcgcatcgaccgcgcctttcgtgccgctatagacggcactggac

SEQ ID NO: 2122 - DNA, 109 bp, synthetic construct
  source 1..109: mol_type = other DNA
aaaatggccaccaccatcaggatttccagcagggtaggcactatgttgaacaccataaagcgcatcagaaaactgatgccgctggtgccacgctctatgtccctcgata

SEQ ID NO: 2123 - DNA, 108 bp, synthetic construct
  source 1..108: mol_type = other DNA
atggatcagaaacattgcatggaggcacgttcggaattgaaggtagtatcattacaacaatcatgctcactattgcttcaattgttttatggagaaagttatggggaa

SEQ ID NO: 2124 - DNA, 102 bp, synthetic construct
  source 1..102: mol_type = other DNA
catcaggtcatggtgatcaaagctttatggaagtttttcaaaattcttgtaatccagggtttgtaaaactgggagaacttctaggtaaagacagattatttt

SEQ ID NO: 2125 - DNA, 111 bp, synthetic construct
  source 1..111: mol_type = other DNA
aattaatgtttttcgaatcaagataacgttgagcatctttgcagtgagggcatttgtctttgacgtaaagaacgacacgtttcattgaatttctctccattatcattggga

SEQ ID NO: 2126 - DNA, 104 bp, synthetic construct
  source 1..104: mol_type = other DNA
ccatgccctttgatgagctgaaagggctgctgacagatattggaacggaagaactggggcatttggaaatgatcggcgcgatcgtccaccagttgacgcggaat

SEQ ID NO: 2127 - DNA, 105 bp, synthetic construct
  source 1..105: mol_type = other DNA
acgattaccaaatgcttggcgaggccgcggactatgtgctgctgatgacctatgaatggggatacgccctttccgagcctatggcggtcgcccccatcaacaaga

SEQ ID NO: 2128 - DNA, 113 bp, synthetic construct
  source 1..113: mol_type = other DNA
agcccatgccgctgttgctggttcggatcgcgctgaccgacaccggatcgccggcctcgaccatctggccgttgccgatcaccatcgcgacgtggccgtcccacaccgcgagg

SEQ ID NO: 2129 - DNA, 102 bp, synthetic construct
  source 1..102: mol_type = other DNA
cgcatctgattacggctcagaaggttacaggtttgaatcctgtcgaggtcacaagaaatcgctactttttaagtagcgatttttttattattaaccttctta

SEQ ID NO: 2130 - DNA, 110 bp, synthetic construct
  source 1..110: mol_type = other DNA
tgtggctaagggcaccgatgttgataagcctcgcaacctggcaaagtcagtgacggtcgagtaagccctgaaatgaaaaataaactaatcgttagtcaatccatcctata

SEQ ID NO: 2131 - DNA, 120 bp, synthetic construct
  source 1..120: mol_type = other DNA
ccgttgacccagggatctccgtcgaaacgacccgcggacgcgctctccgagcgcaacccgcgggtcgtttcggctgtcaagctccatcgcgccgcgcaccggcgcaggaccggcctgttc

SEQ ID NO: 2132 - DNA, 112 bp, synthetic construct
  source 1..112: mol_type = other DNA
ggcaccacactggaagtgctcaccgagcgcacccgcgagcagtggcaactgaaacgctggagaaacgccttgcgcgaccacaccgtcatcgtcggcttcgggacgaagggcc

SEQ ID NO: 2133 - DNA, 103 bp, synthetic construct
  source 1..103: mol_type = other DNA
atgaaaaaaggcttatctctatttttggacagcctcttatttttttattataatagttttctaaagatgctctatttataaatttttatcaaagattttataa

SEQ ID NO: 2134 - DNA, 103 bp, synthetic construct
  source 1..103: mol_type = other DNA
caggacgatcagcaatcgatgcggttgcatcctttgtagggagttattcactcgctttattaattacaaatcgcgtgtataaagaaggaaagtatacgacaaa

SEQ ID NO: 2135 - DNA, 107 bp, synthetic construct
  source 1..107: mol_type = other DNA
tggtcgccgtaaagagcctgttgatgtgtttgtatcttgcgttgttgtctggccggtacagcaccaggtctttccagttgcggattcgtggcatcagcctgatgccg

SEQ ID NO: 2136 - DNA, 118 bp, synthetic construct
  source 1..118: mol_type = other DNA
gattgaaggggtaatgatcggtgtggaaatcgatcttgcaaatggactgccgcagacgaatatcattggcttaccagattcagcgattcgcgaggctgttgaacgagttagggctgcc

SEQ ID NO: 2137 - DNA, 103 bp, synthetic construct
  source 1..103: mol_type = other DNA
gcacccgttccttgctttcgcggactgcagcgtccggcaggcccacaatattgaaggcgggcagaccgttggacaggtgcacctccacggtaacctccggggc

SEQ ID NO: 2138 - DNA, 103 bp, synthetic construct
  source 1..103: mol_type = other DNA
ccacaaaatcctatatctgcatttttacttaaaacttgttgcattgttttatcggcaccttgtcctgttgctaaatctatttctaatccttcttcttcgaata

SEQ ID NO: 2139 - DNA, 105 bp, synthetic construct
  source 1..105: mol_type = other DNA
tgcttgcagtcggttcgaaaagttgtacataatcacctgtacctgaagcaaaggcattcgcaatattggcaaaatcaatattttgaatcaatgttaaatcattgt

SEQ ID NO: 2140 - DNA, 105 bp, synthetic construct
  source 1..105: mol_type = other DNA
cgcgccgggattggccgcgggctgcggaggttcagtaggtgaacatcgacgcgttcgccgcctccgcgtcgtcgtactggtgcgaagcgcggccgagggccgtgt

SEQ ID NO: 2141 - DNA, 103 bp, synthetic construct
  source 1..103: mol_type = other DNA
gccgcgcgggaacgtcggccgccgtattggcgtgcacggtgccgcagccgccctcatggccggtgttcaaggcccccaacagatcggtgacctcggcgcctct

SEQ ID NO: 2142 - DNA, 107 bp, synthetic construct
  source 1..107: mol_type = other DNA
taaggcgagacatgtttttccagatgctacaaacaattagggccacattatctaatgtggcccctagaaatcaaggaaaactggttgtttatacagttagcattcaa

SEQ ID NO: 2143 - DNA, 102 bp, synthetic construct
  source 1..102: mol_type = other DNA
tttcgttcaaaggtttctaggcttttacgagcagagcaacacactccacgtgatgcgtcattggaaacaaatccacgggctgaacttttgtgagtttatagc

SEQ ID NO: 2144 - DNA, 105 bp, synthetic construct
  source 1..105: mol_type = other DNA
tccgcagcgccataatcaatgcgggttttgaattccccatgcgcaggatcaccatcaatctggcaccggccgatctgcccaagcaaggtggacgttacgaccttc

SEQ ID NO: 2145 - DNA, 103 bp, synthetic construct
  source 1..103: mol_type = other DNA
cacggccggctcgatgtgagcagccaccccttctgtggcggcgtgccgaccgacgtgcgcatcaccacccgctacaacgagcaggagtttgtctccagcctga

SEQ ID NO: 2146 - DNA, 104 bp, synthetic construct
  source 1..104: mol_type = other DNA
gtcgggacgatcgcgccggcgaagacgcgcttcctgtcgctcggcgtcggcaagcccggcgagatctcgctcgcgcatcagggcgtgctgttcctcgacgagct

SEQ ID NO: 2147 - DNA, 109 bp, synthetic construct
  source 1..109: mol_type = other DNA
cgtccccgcaccgggatgtgggtgaacgtcggctccggggccgggttctggaagaagtcgttgcccttgtcgtccacgacgatgaacgccgggaagtcctcgacctcga

SEQ ID NO: 2148 - DNA, 109 bp, synthetic construct
  source 1..109: mol_type = other DNA
ctactgctggaacggcgaggagtaagacaggacataaagagagccgcctttaatggcggctctcttttatttctctgcccgtaccaggagcatcatcggcctgcgcagt

SEQ ID NO: 2149 - DNA, 104 bp, synthetic construct
  source 1..104: mol_type = other DNA
gatcgcccgcgcccgctccaccgggtccgccggaggctccccctgctcggccctcgacaaggaggggccgcctccgtcctcgccgggcgattccccgaagccgc

SEQ ID NO: 2150 - DNA, 108 bp, synthetic construct
  source 1..108: mol_type = other DNA
cctggtagcgagccgccgcttcggcaatcgccgggatatccaccgggaatttcggattacccggatggctaatcatatgcactttaccgctggccatcgcggctatca

SEQ ID NO: 2151 - DNA, 109 bp, synthetic construct
  source 1..109: mol_type = other DNA
atacgcccgcatggcgttgggcgactgggcgggtttcaccactggctggctctactggtatttctgggtgatcgtcgtcggcatcgaatccgtcgtcggagcaaccttg

SEQ ID NO: 2152 - DNA, 109 bp, synthetic construct
  source 1..109: mol_type = other DNA
gaaagaaattacttaaagataaattaaaagaatgggtatcgtcagaaagacttaattaatttcatcccaccattcaaacatggagataagaatttgattgctaagttcc

SEQ ID NO: 2153 - DNA, 102 bp, synthetic construct
  source 1..102: mol_type = other DNA
cttcattcacatcataaaagcgattcattaaattcataatcgttgtttttcctgagcctgtcggtccgactaaagcgaccatttcacctttatccacatgaa

SEQ ID NO: 2154 - DNA, 112 bp, synthetic construct
  source 1..112: mol_type = other DNA
atttcctctgtgtaacccgccaatatgcaaataaaatcgtttttatgatcttccatcgcctttgttagacaatcaactgcttccttaccaaaatccttttctcccccacggg

SEQ ID NO: 2155 - DNA, 113 bp, synthetic construct
  source 1..113: mol_type = other DNA
aatataagagacgtgaataacaatatgtttttacgacttgctcatttgaatggtggaggcgaggggagtcgaacccctgtccgaaatcgtatccacaagagcttctccgggtg

SEQ ID NO: 2156 - DNA, 102 bp, synthetic construct
  source 1..102: mol_type = other DNA
aaagataaaagccagagtgtatggaaagagaaagttttgaatgtaaatacaaaaaatggacaaacatacttgactatgcaaaacaaagccaataaattgtca

SEQ ID NO: 2157 - DNA, 103 bp, synthetic construct
  source 1..103: mol_type = other DNA
taaatacagattctccagtcgatactgttttaggttgttgggtaatcaatcataaattttcaggtagtgatgaggcaggtaaaatagtcataaatggttcata

SEQ ID NO: 2158 - DNA, 102 bp, synthetic construct; identical to SEQ ID NO: 1322
  source 1..102: mol_type = other DNA

SEQ ID NO: 2159 - DNA, 104 bp, synthetic construct
  source 1..104: mol_type = other DNA
ccttgtcagtttcttcatcaacgtcccagaaaacataatagattcggtccaatgcagcctcctttattgcggtcctccataccagacatgaaaatgcttaaagt

SEQ ID NO: 2160 - DNA, 106 bp, synthetic construct
  source 1..106: mol_type = other DNA
cagcaaggcctggtcggtggtcagcccactgtcgaccaggtggtcgtgcagcaggcggaacttgtccatcgggaagcggtgctcggcagggaactccgggctgtag

SEQ ID NO: 2161 - DNA, 102 bp, synthetic construct
  source 1..102: mol_type = other DNA
tgagcgccttgcggttgtcgagcatccgaacctcatccggcatgagcagttcacgccctgcgttctggtaattggtgctgctggagccgctgcgccccttcg

SEQ ID NO: 2162 - DNA, 112 bp, synthetic construct
  source 1..112: mol_type = other DNA
gcctccaccccgcgctggttcgaccagcaggccggtgcgtggcgggacgggcacaccaactggttctccgtccaggcgttccgctcgctgggcctcaacgcgctggccagca

SEQ ID NO: 2163 - DNA, 114 bp, synthetic construct
  source 1..114: mol_type = other DNA
ttgcccggtatcaggaaactttacttatgatagttgacactgcttattcaacacatgtggagtgtgtggtgttgttggttaggaatgacagataattgaggtatactgacgtgt

SEQ ID NO: 2164 - DNA, 112 bp, synthetic construct
  source 1..112: mol_type = other DNA
attccgtcatccactatcatgcggtgatttaccaggctttgaagtatgcgatgaaaaccgaccttgttacgcagaatgtggcaatgaaagttgatcgcccgaaaaagaatga

SEQ ID NO: 2165 - DNA, 111 bp, synthetic construct
  source 1..111: mol_type = other DNA
ggatgaggctcgcgaacgcctccgggtccttgcgggtgttgcccaccccaccggggaacaggcagtcgccggtgaacacgtgcggatggccgtgcgggtcgtcgtagacca

SEQ ID NO: 2166 - DNA, 138 bp, synthetic construct
  source 1..138: mol_type = other DNA
ccatacatatcaatcctttcttttgttacatttttaattacttatacataaaagtaagacattactacaaaactcccaaaaattattgctgttgctataagtaaaattacattagcccaaaacttaaatctatactct

SEQ ID NO: 2167 - DNA, 110 bp, synthetic construct
  source 1..110: mol_type = other DNA
cggcaaggacctcaccctcgcccgacttccggggaaagatcaccgtcctggacttctggaccttctgctgcatcaactgtctgcacgtcctcgacgagctccgcgagctg

SEQ ID NO: 2168 - DNA, 105 bp, synthetic construct
  source 1..105: mol_type = other DNA
cgggttcatcgccgctacgagctggaaccgcgcgggataggtggtccggtggttcgcgcgggcgatcatgatcttgcccgtctccatcggctggcgcagggagtc

SEQ ID NO: 2169 - DNA, 106 bp, synthetic construct
  source 1..106: mol_type = other DNA
acatcaaaaacaaagatttaaaaatggctaaatatttagtaacccaatacggcggtgcaaacggcgaattagcagccgcttggcgttacctaaatcaaagatatac

SEQ ID NO: 2170 - DNA, 102 bp, synthetic construct
  source 1..102: mol_type = other DNA
atgcccaacgctatctggactcaaagaaaattgaatatcgcctaacgaatgctaaaatgcagcgtggtcgtaaagaattacaggcaatgggcgcgcgctcta

SEQ ID NO: 2171 - DNA, 102 bp, synthetic construct
  source 1..102: mol_type = other DNA
cctcgacgaccaccgtggcctgccccagcgccgcgatcagtcgattacgcgcgaggaagcgccaccgcgtcggcgccgtgccgcacggcacctcgctgacga

SEQ ID NO: 2172 - DNA, 102 bp, synthetic construct
  source 1..102: mol_type = other DNA
cgagtccgggcggtccgatgagcagggcgaggacgatggtcaggttgctgccggaaacggcgaggagatgggacaggtcggtcgcggtgaacgcgtcgtgca

SEQ ID NO: 2173 - DNA, 116 bp, synthetic construct
  source 1..116: mol_type = other DNA
gaaaccaaccaaatcacaccaaaggttaccggaatcacgacagcagcaatgtggttgatggtaaacgccacaccagccgttgatgccatgtctgccggatcggcaatcttctggaa

SEQ ID NO: 2174 - DNA, 109 bp, synthetic construct
  source 1..109: mol_type = other DNA
ccaaacttaactgaaatgttttcaaacagtggcttagcgccaaattgttgagtaatattcgctgtagaaatcaaagcctgtaccttagtgcgttaacattcccgcccac

SEQ ID NO: 2175 - DNA, 102 bp, synthetic construct
  source 1..102: mol_type = other DNA
ccgaggaactcggccgggtggatcacgggtcctttccgatggccttcggggtccacgtcgcgatggccaccccctcgctgcacaaacacggcagcgatgagc

SEQ ID NO: 2176 - DNA, 105 bp, synthetic construct
  source 1..105: mol_type = other DNA
agaccgaggtcgacgactgccgctggaccccgtgcttcgactgcggcgtctgcccggcgatggacaccgagatcaaggtcggtccgacgggcaagaagctgctgc

SEQ ID NO: 2177 - DNA, 105 bp, synthetic construct
  source 1..105: mol_type = other DNA
ccgccaccgaggcggccaccccctcggcgaggcggcgccagcagttgacgcgcacccgaaggctgttgccgtcgacccagcggccgctgtcgcggtcgagccggc

SEQ ID NO: 2178 - DNA, 106 bp, synthetic construct
  source 1..106: mol_type = other DNA
aaccccctcccaaccagtgtgtcgactggtgggagagggtttctcctgcggtggagctagggggattcgaacccccgaccttctcattgcgaacgagacgcgctac

SEQ ID NO: 2179 - DNA, 111 bp, synthetic construct
  source 1..111: mol_type = other DNA
cgcgcgcggtggaggtgcaatgcaacctcgtcgccgggctgcccaagttcgtcgtcgtcggcctgcccgacaaggcggtggcggaaagccgcgagcgggtgcgcgccgcga

SEQ ID NO: 2180 - DNA, 102 bp, synthetic construct
  source 1..102: mol_type = other DNA
agagcccgatgtcggacatgaacggcccgacgagcgccgagcccatcgagttcccgaacttgtacgccccgacgaccacgatgaacacgatgaccccggggc

SEQ ID NO: 2181 - DNA, 105 bp, synthetic construct
  source 1..105: mol_type = other DNA
aatcacccaaaggaagaacaatgactatcactatgtttggcattccgaactgcgacaccattaaaaaagcaaagaaatggctcgaagctgaagggatcaagttcg

SEQ ID NO: 2182 - DNA, 108 bp, synthetic construct
  source 1..108: mol_type = other DNA
atgcagaccgaaagtaacatcggccaggggaagcggcgaggtaaatcaagggtcattgaagtcataatcatttcagtagaaaaaccaggccccgattttaaatgcaaa

SEQ ID NO: 2183 - DNA, 100 bp, synthetic construct
  source 1..100: mol_type = other DNA
aggggtcatccagtctccttcctcttcattttcggcgggatggaagtggctggaatgtattttttgtttgaatgagaatgcctatttcgatggcgtgaat

SEQ ID NO: 2184 - DNA, 103 bp, synthetic construct
  source 1..103: mol_type = other DNA
ataagagatagtgagactgccaaaattgctgtgagagcagcgcttaccggacacttggttttgacaacgatgcatactaaagatacaaaaggatctttgtaca

SEQ ID NO: 2185 - DNA, 107 bp, synthetic construct
  source 1..107: mol_type = other DNA
cgtcgagcttgggccggggacgccggggcagtcgggcattcatacgtgcatgacgaatacgaagaacacgcccatcgaggcgctcgagcgggcgttcccactgcgtg

SEQ ID NO: 2186 - DNA, 110 bp, synthetic construct
  source 1..110: mol_type = other DNA
cgatttcggttccaccgcagccgctttttcaggcgggcagggcgatttcaccgttgaattcgagccgcatgccaccgctctggagcaaaaaggcgacggatatgtagtag

SEQ ID NO: 2187 - DNA, 103 bp, synthetic construct
  source 1..103: mol_type = other DNA
ctgcagctgctgctcctcctcatgtccgagcccaatgtcatcatcctcgatgagccgaccaacgacgtcgactccgatatgttggccgcaatggaggatctcc

SEQ ID NO: 2188 - DNA, 110 bp, synthetic construct
  source 1..110: mol_type = other DNA
gatcttcgctcgctcgaacgcgatcgtcgacccttccggatcgtgttcgtcgtcgtcggtggtccaccgcgatccttcgatcaccgacgccagttcgtctcgcagggact

SEQ ID NO: 2189 - DNA, 146 bp, synthetic construct
  source 1..146: mol_type = other DNA
acactcaaacttgataatgaagtaattaaacaggttttcaatgatactccactcgacgaagtgcccctcagcacttcgtctttatttttgccacaaaccctatatcttactatttaactaatagaactattgtttgacaataatct

SEQ ID NO: 2190 - DNA, 119 bp, synthetic construct
  source 1..119: mol_type = other DNA
cgccacaagttgacaaggcaggcgcttgggagggtgtccgcacatgctggatacgccgaaaagcgctcttttccatcactacatgggcatttcgcggctgctcgccgggcagctcgaat

SEQ ID NO: 2191 - DNA, 102 bp, synthetic construct
  source 1..102: mol_type = other DNA
cgctcatggataactatttggataatgtggaagcttattgcaacatgaacaaaatccgtgatcccgttacaggtgaggagatggatccagatgagcgcctga

SEQ ID NO: 2192 - DNA, 103 bp, synthetic construct
  source 1..103: mol_type = other DNA
ataatgttaaaacagatcagaaaaaaatatcactcacaattaattgtgcatggaatgcagatgacatagataaaatattaaaaacattgaaagataacaatgt

SEQ ID NO: 2193 - DNA, 102 bp, synthetic construct
  source 1..102: mol_type = other DNA
ttagtcatataacacattttaagtaacttttctctcacttatgatacgtttcgttgttcaatattttaaaagccctaaaaatctgctctactaaaatgagcc

SEQ ID NO: 2194 - DNA, 104 bp, synthetic construct
  source 1..104: mol_type = other DNA
ataggccagcaccagattccacaccaacgcgccgccggcagtccagatcaggaaacgcacatgccccatgcggaacaggccggcgggcagcgagatcatcgtgc

SEQ ID NO: 2195 - DNA, 102 bp, synthetic construct
  source 1..102: mol_type = other DNA
ccaccaagcacattgaggtgggcaccggcgttattgatatgcgttatgaaaatcctctgtacctcgcggaagagattgcgtctttagaccagatcgcggaag

SEQ ID NO: 2196 - DNA, 102 bp, synthetic construct
  source 1..102: mol_type = other DNA
cgatttatgtttacgcccaaggtgcgagcgacccggttatcaactttgcccaattaacccaaacagatggaacatttcttatctcgcgggagaaaaacgaac

SEQ ID NO: 2197 - DNA, 106 bp, synthetic construct
  source 1..106: mol_type = other DNA
accgccgctgcctccccgtcgggcccggtcaccacgttcaggcaccagtgcatgccgtaggtgaaatagacgtaggcgtgacccgccgggccgaacatcgccgcgt

SEQ ID NO: 2198 - DNA, 100 bp, synthetic construct
  source 1..100: mol_type = other DNA
cccgcgtcgtcgaaggcgagcccgctgccgtcctgccacaggttcttgacgaaagtgattcagatgaaccagcttcacaccccgaacgcgagcaggaacc

SEQ ID NO: 2199 - DNA, 110 bp, synthetic construct
  source 1..110: mol_type = other DNA
cctaccatcccctcggcgccggccactccggacaatttgcgagttttgaacacaaagctgatcagtagcaggaaaaacagcaggctcacgacgctgaccagggctatcac

SEQ ID NO: 2200 - DNA, 109 bp, synthetic construct
  source 1..109: mol_type = other DNA
cttactaaagataatattaaactagaaccaccataagaaagaaatggaagcgttacacctgttataggaacaagtcctacaacaactgctaaatttaataatgtttgaa

SEQ ID NO: 2201 - DNA, 102 bp, synthetic construct
  source 1..102: mol_type = other DNA
gaagggaactgttatctcgcagataccgacggatttctcctatgatcataggaaccgcgtaagtagaaaacttcacctggcgatctggatcaaagttatcta

SEQ ID NO: 2202 - DNA, 101 bp, synthetic construct
  source 1..101: mol_type = other DNA
cctgttcatcgaccactgaggtgggcgtattctgcctgctttttaaataaaataaaagctcgattatttagaaacctctatatcaaaagcaaaaggactgc

SEQ ID NO: 2203 - DNA, 102 bp, synthetic construct
  source 1..102: mol_type = other DNA
cttcatcggcctgatacagaccgtacaacacattcatcagtgtactttttcccgccccattttcacccagaagggaatggatgctgcccttctttacgtcca

SEQ ID NO: 2204 - DNA, 105 bp, synthetic construct
  source 1..105: mol_type = other DNA
gggcggtacgctacagtgccgcccgagtgttcgtcgtccacaaccatcccagcggctgtccccaagcctcacaggcagatctgctgtttacacgccgcttgatca

SEQ ID NO: 2205 - DNA, 104 bp, synthetic construct
  source 1..104: mol_type = other DNA
aaggctcgctcacgggtaaccgtgtcgactgcttcatcctcgacgacctctacaaggatgccctcgaagccaattcgcccatcgtccgcgccaattgctgggag

SEQ ID NO: 2206 - DNA, 103 bp, synthetic construct
  source 1..103: mol_type = other DNA
tctaaagcatcatagtgagttctctccataccatgtgaagcgtgaactccagggcctataaggccaccttttatattatttccacctcttaatgcagctccaa

SEQ ID NO: 2207 - DNA, 109 bp, synthetic construct
  source 1..109: mol_type = other DNA
ccacgactctccgtaccatattaatcggagcgactgccatcggagggccatatgtatatccccactcatatgtcatcagcaaaacgccgttggcggcttctcccagagc

SEQ ID NO: 2208 - DNA, 102 bp, synthetic construct
  source 1..102: mol_type = other DNA
aacgagcaaaccgtgtttttgcacgatagcccgttccttccggtgataattcgattgcggttactgtctccccgaacgttgccgcccaggaatcaaagtgtc

SEQ ID NO: 2209 - DNA, 105 bp, synthetic construct
  source 1..105: mol_type = other DNA
ggaaccggcagcgggtcggattctaaaaccttttttgcctgataatcatacaaataagtgccattacaacaaattgcaggtgtatctaacgccagtgcctgataa

SEQ ID NO: 2210 - DNA, 146 bp, synthetic construct
  source 1..146: mol_type = other DNA
caacgcagcaagtaaatatccgggtgtagcgcagctggtagcgtgcttgactgggggtcaagaggccgcaggttcaagtcctgtcactcggaccaagaaaaccgcctttttcgtaagaaatcggcggttttttgcatataaagttc

SEQ ID NO: 2211 - DNA, 108 bp, synthetic construct
  source 1..108: mol_type = other DNA
cttcggtacgcagctgggtcaggatgcgttctgaatcgaccaggtttttggggcaacccaaggagacgaatcctactttgggggcctgttttgtgttggacatcgctc

SEQ ID NO: 2212 - DNA, 109 bp, synthetic construct
  source 1..109: mol_type = other DNA
aaggaaattgcaggtgaactttttataagtgaaaagacagttcgcaaccacatctcaaacgcaatgcaaaagctaggggttaaaggacgttcacaagcagttgtggagc

SEQ ID NO: 2213 - DNA, 102 bp, synthetic construct
  source 1..102: mol_type = other DNA
gatatcattgtataaaggtacagcctgttgatatgttcccgtttagtcaccacatagaaaatgtagcaaagcttataaaaaaacaaataaccagataaataa

SEQ ID NO: 2214 - DNA, 122 bp, synthetic construct
  source 1..122: mol_type = other DNA
atgtagcttctggtaaaccgtaagaatttgaaaccggatcaccaaacagttcgacaaatcgggctttgataaattcgtcaagtttttgtaattcctgttggcgcatctgaatcaacttatga

SEQ ID NO: 2215 - DNA, 131 bp, synthetic construct
  source 1..131: mol_type = other DNA
tcagtaggccgggggttcgagtcccttccatcgcaccagaaaatgccgtgaaatcgaaagatttcatggctttttggttttgtaagccatggctgcacggtttctgcacggtcggtgttatccatgtccga

SEQ ID NO: 2216 - DNA, 108 bp, synthetic construct
  source 1..108: mol_type = other DNA
ggcaaaataaggagcatcaataaactaataatgaaaagcacaattgctgcttcaatcagagtaaatgcttgtcgactttttttaaaaattttcattgatataaccccc

SEQ ID NO: 2217 - DNA, 100 bp, synthetic construct
  source 1..100: mol_type = other DNA
cccgatagctcagcggtagagcattcgactgttaatcgaatggccgtaggcgattgcggcactcgccaaccatggctagcgagcacatgccttcagattc

SEQ ID NO: 2218 - DNA, 103 bp, synthetic construct
  source 1..103: mol_type = other DNA
atgtatttttctgccaaaacgcagacgctggcacagttcaaaatccactataacaagcagcttttaaacgaagcacccaaaaacggctcgcctgtcatattct

SEQ ID NO: 2219 - DNA, 102 bp, synthetic construct
  source 1..102: mol_type = other DNA
ttataatatcattcttagtcatcagcagataaatatccaccctaatacgactgcttttccaggcagtattcttgctgaccaacatgccctgaataacaaaca

SEQ ID NO: 2220 - DNA, 102 bp, synthetic construct
  source 1..102: mol_type = other DNA
caagggcgatcttgcccttctcgtcgacgacgaatgtggaccggatgacgccctgcacggtcttgccgtacatcttcttctcgccgtaggcgccccaggccg

SEQ ID NO: 2221 - DNA, 113 bp, synthetic construct
  source 1..113: mol_type = other DNA
cacgaacgccttgaccgcgcgcccggcgaggccctccgtggcgacgtggtggtcgatccgccagcccgtgtcgttgtcgaaggcgcgcccgcggtaggaccaccaggagtagg

SEQ ID NO: 2222 - DNA, 104 bp, synthetic construct
  source 1..104: mol_type = other DNA
tgatcaaatgcagtggacgacgtaatcgtaaagtcaaagcctttatttctgtaccattctgtgtaaacgcgattcagtgtaaaagacataatcgccagtacatt

SEQ ID NO: 2223 - DNA, 102 bp, synthetic construct
  source 1..102: mol_type = other DNA
gccctgccgccgccagcgcggtgcggcggaattgcacaggtgtagatcggagacattatgctttacactaagggctacgatttcttccagcttcataactca

SEQ ID NO: 2224 - DNA, 104 bp, synthetic construct
  source 1..104: mol_type = other DNA
gagcggctttttgaccgcattgttgccgctgacggcgcgcttatcaccgagtacccgccaggagtgacacccgatcggcaccggtttctcacccgcaatcgcct

SEQ ID NO: 2225 - DNA, 104 bp, synthetic construct
  source 1..104: mol_type = other DNA
cgctgctcgcgccggccgccgcgtcggcgagcaactcgggggtgtatttgtacttcgccatgccccggaatttatcggctgcggccgacaattccgggagcgtg

SEQ ID NO: 2226 - DNA, 114 bp, synthetic construct
  source 1..114: mol_type = other DNA
caaggggttgatcgcgttcacgtcgtcaccgggttcggtgtgctacatgcacggcccgacctacggggcgcagaaggccggcgtggacaaactcgcggccgacatggcggtcga

SEQ ID NO: 2227 - DNA, 108 bp, synthetic construct
  source 1..108: mol_type = other DNA
tgaagtgcgagtacgtctggaagcgcacggacgactggatcaacttcccgtggagcgttctgcctccggtgcacaggtcgggcgaggcgcccaagggcaaccgcgaag

SEQ ID NO: 2228 - DNA, 102 bp, synthetic construct
  source 1..102: mol_type = other DNA
aaatgacccgccagaacgcgcccgcgtccggggttccgaccggttttccctcgtacatgaccgtcgtcgccccgatcaggagcggcgcgtagacgatgtagg

SEQ ID NO: 2229 - DNA, 102 bp, synthetic construct
  source 1..102: mol_type = other DNA
gtatccggtggtaattgacgtactgcctgaaattccggcctgacatcaggttgacggtcttcgagaggtagagcttgttggaatacatctgtcttgacatct

SEQ ID NO: 2230 - DNA, 108 bp, synthetic construct
  source 1..108: mol_type = other DNA
agctggaacaggacccgaccctgcaacgctgcccgcgctgtgaagcccgctatcgcaagggattccacgcccacgaactctgagggatgcacgtccgtgcatcctctc

SEQ ID NO: 2231 - DNA, 109 bp, synthetic construct
  source 1..109: mol_type = other DNA
ggttgctatcgagacgccggcttctctggcaacatctttgatggtgatagccatataaatccccattccgccgccttcggctggcggcacaaatagtaatgaaagtgtt

SEQ ID NO: 2232 - DNA, 102 bp, synthetic construct
  source 1..102: mol_type = other DNA
ggccgtgcagaatgccgaacacaacgaaatcaataatgttgccatcagtattcccgatagtgacacctaataccgccatgatggtaaaaccaaggccggtta

SEQ ID NO: 2233 - DNA, 106 bp, synthetic construct
  source 1..106: mol_type = other DNA
aagatccggcagcgcaggtcgtcgccgagctgcgcgcagcgcacgccggccggcttgccgcccggcatccccggaatcgggctggaaatcgacggcgcgatgcagc

SEQ ID NO: 2234 - DNA, 106 bp, synthetic construct
  source 1..106: mol_type = other DNA
ccgggcaagactcaggtggcgtggaattcggcgttgatctacgacatgatcttcacccagccggtgtactacgagttcaaggacttgaagatgccgacgctgctgc

SEQ ID NO: 2235 - DNA, 104 bp, synthetic construct
  source 1..104: mol_type = other DNA
tcaaggctatttaagagtgcgttactgtgcacaggctagagcggttgaaaatcagatttataccgttatctcaggaactgtcggaaaccttccgcaaaccgaaa

SEQ ID NO: 2236 - DNA, 103 bp, synthetic construct
  source 1..103: mol_type = other DNA
taaggggcaaaagggataaaaaaatcgagtacccatatgggtacccgaagtggtgcggataacaggacttgaacctgcatggacttgcatccattagaacctg

SEQ ID NO: 2237 - DNA, 105 bp, synthetic construct
  source 1..105: mol_type = other DNA
taactcaagaagggaatttcaaagcgggtagatttgctctgatttcagcagatgagctgataattgctcacacaaatgaaacggaatacaaatcctttatcggaa

SEQ ID NO: 2238 - DNA, 102 bp, synthetic construct
  source 1..102: mol_type = other DNA
agcgcgacgagttcttccacgacgggacgccagaactccatcgccaggcttccgtcggccaccacggtgatctcccagccggccgcgtccgcgggatggggt

SEQ ID NO: 2239 - DNA, 113 bp, synthetic construct
  source 1..113: mol_type = other DNA
tcttcaaataagatttcctcccgatgataccaaggataccccccgaaaatttcatctgcacattcgccggaaagtccgactgtaaaatcttttttaatttcccggcaaaacag

SEQ ID NO: 2240 - DNA, 114 bp, synthetic construct
  source 1..114: mol_type = other DNA
ggcgggcaaggtccgccaggagggcaaggagtacgtcatggtcgacggcgacgtcgtcgagttcaaatttaacgtgtagtgcttaacctctgcgatgaactctttgatcccggg

SEQ ID NO: 2241 - DNA, 103 bp, synthetic construct
  source 1..103: mol_type = other DNA
caatgccatataggcaagtggcttcattacttacagatattgggacagaagaacttaatcacctagaaatggtcagtgttatggtacatcagctcacaagaaa

SEQ ID NO: 2242 - DNA, 111 bp, synthetic construct
  source 1..111: mol_type = other DNA
gcgtcatcttaattgagcaagtctaccgtgcgtttaaaattatgcgaggggaagcgtatcataaatgatgcggtttttataaggttcttcttattagtgaaattgttaaaa

SEQ ID NO: 2243 - DNA, 104 bp, synthetic construct
  source 1..104: mol_type = other DNA
aaaacgtcggtactgctgctgaaccaattaacattggttttattggagtggtgactacagaaatcccaaatcttgtattagcagaacatcataaagattacacg

SEQ ID NO: 2244 - DNA, 106 bp, synthetic construct
  source 1..106: mol_type = other DNA
atctaacgcatattttcgtagcaaaaatatcgccgtctgagccgcttttaactcacagttacaatgatcgataagcaactcttccaaggaatctgattttatcgcg

SEQ ID NO: 2245 - DNA, 103 bp, synthetic construct
  source 1..103: mol_type = other DNA
agatggactcggtgcgtgccagggccgcgaccgccggcgtggccaggtggtagtccagtcgccatcccacgttgttggcataggcctggccccggttgctcca

SEQ ID NO: 2246 - DNA, 103 bp, synthetic construct
  source 1..103: mol_type = other DNA
aatggcgctgagaaggcgcgccgcgctataccgccgacggcccggaagcattaccctataccccccccccggagccccagcggagaagcgtcgatatgcgcga

SEQ ID NO: 2247 - DNA, 107 bp, synthetic construct
  source 1..107: mol_type = other DNA
agaaggcgagccgcgcgaggtggtgcgcgttggcccagtcacggatctgggtccagatcgccggtgtcgtgttctcctgctggtcggagagaccgttcatgccggag

SEQ ID NO: 2248 - DNA, 105 bp, synthetic construct
  source 1..105: mol_type = other DNA
atttctgacggagaatacccctgatcaccaagtgctttagaaccccattgggtcatccagttcggacactgaacctgtcttccgtcacagtattgtgtcagaatc

SEQ ID NO: 2249 - DNA, 109 bp, synthetic construct
  source 1..109: mol_type = other DNA
ctcttatcacacaaattggacgtctccaccccggaggtttacacggagcagggcgttccggtcatggccgacggcgttgccattatcaaaatcggcggatccgtcgaag

SEQ ID NO: 2250 - DNA, 107 bp, synthetic construct
  source 1..107: mol_type = other DNA
gaccggcgcgaaggccgactccgcgcaacaatcgccacaccgttgctcgattgcaagcatccgcacgatcagcttgaagtggcagagaatttcgagagcgctgcatc

SEQ ID NO: 2251 - DNA, 113 bp, synthetic construct
  source 1..113: mol_type = other DNA
aaaaacaataaaaaatgcctcaaccgcgcattagcgcgttgaggcatcaatggtgccgctggccggacttgaaccggcacagtatcgctaccgagggattttaagtcccnnnn

SEQ ID NO: 2252 - DNA, 104 bp, synthetic construct
  source 1..104: mol_type = other DNA
atgattacgcgaagctcgcgcggaacgccgactatgtgctggtgatgtcctatgaatggggctacacctacggcccgccgatggcggtcgcgccgctggcagca

SEQ ID NO: 2253 - DNA, 110 bp, synthetic construct
  source 1..110: mol_type = other DNA
ataaccttgttccatgcgcttatacgttacgctggttcctaaagtatctgatgacataattgttcatccataattataaaaaggttattgtaaaagtatatctaacactg

SEQ ID NO: 2254 - DNA, 105 bp, synthetic construct
  source 1..105: mol_type = other DNA
cgggcaggcgctgggccagcatcgacttgccggtgccaggcgggcccaccagcagcaccgaatgctggccggcggccgccacctccatggcccggcgcgcctgcg

SEQ ID NO: 2255 - DNA, 145 bp, synthetic construct
  source 1..145: mol_type = other DNA
ttgacacgcaatagaagcgttccgcaggaatgcgcagcctgcatccaccggatgcagaacataaggggtttgggcacagcccaacaagcattttgcaaagcaaaatagcatttgtatagacgaatgccctgcttgctacaaccgc

SEQ ID NO: 2256 - DNA, 102 bp, synthetic construct
  source 1..102: mol_type = other DNA
ttttgacattattttatctatataaagtagacacctttatctactctacagtgactgactttgctaaatttcttggttgatcaatatcggttcctcttaaca

SEQ ID NO: 2257 - DNA, 111 bp, synthetic construct
  source 1..111: mol_type = other DNA
atgctgctgccgcagaaatggctgaagtcataaatgcatgtgcagccaggccatctgcttttaatgcactaccggcattgaatccaaaccatccaaaccaaagaagagagg

SEQ ID NO: 2258 - DNA, 105 bp, synthetic construct
  source 1..105: mol_type = other DNA
cgattagctttggggatgtaggattagttgcgcaggcaactattttcaagaaaattcgctttggaacgcatgataatataggatcggggcctattcatttacccc

SEQ ID NO: 2259 - DNA, 107 bp, synthetic construct
  source 1..107: mol_type = other DNA
aactggccgttgtatgccgtggtgctgttttcttgggtaatagctctggctgagtattcttgccaggttccggccaatcggataggctttttaggcaatggaggccc

SEQ ID NO: 2260 - DNA, 104 bp, synthetic construct
  source 1..104: mol_type = other DNA
accactttgacgtgagccagggcgtgcagttttccacttatggggtgccgatgataatcggcgaggtacgtcgcttcctccgtgacaacaactccgtgagggtc

SEQ ID NO: 2261 - DNA, 107 bp, synthetic construct
  source 1..107: mol_type = other DNA
cagcatcctgctttaaaagcttcaccgcagataaacctatacacgtagcagtctccttattagcaggctctacaaaaatattattttcattaatatccgaaagttca

SEQ ID NO: 2262 - DNA, 104 bp, synthetic construct; identical to SEQ ID NO: 1459
  source 1..104: mol_type = other DNA

SEQ ID NO: 2263 - DNA, 102 bp, synthetic construct
  source 1..102: mol_type = other DNA
cagagccaattagcggacccaccacatttccaagatacataaacgactggttatagccgaagatgcggccagtgacctgatcggaagagtacttcagcagca

SEQ ID NO: 2264 - DNA, 108 bp, synthetic construct
  source 1..108: mol_type = other DNA
ggtcgtccgtgagcaccatcaggtgttcatatgttgctcttgccttctgctctgctgccatgtcctcagtaatatcggctattgggtcgcctgtgcactgcaaatagg

SEQ ID NO: 2265 - DNA, 112 bp, synthetic construct
  source 1..112: mol_type = other DNA
cttcacccgctacgggaagagccagaaggcccagacccgcggccaggccctcggcctgccgacgacgatgacgctcttcgccttcctctccgtgatggtcacctccggctcg

SEQ ID NO: 2266 - DNA, 105 bp, synthetic construct
  source 1..105: mol_type = other DNA
ctcagcccaagaagctcagccgcaccttgcggtcggggttgtccacgttcgtgtccaccaggcacaccgactgccaagtccccagctccagactcccgttgacga

SEQ ID NO: 2267 - DNA, 104 bp, synthetic construct
  source 1..104: mol_type = other DNA
acgatccgtggccgtgggaaaggagataatttatgtggcagtatgagaaaaaattacagtaccctgttaagataaaaacacccaacgcaaagctggcaaaggtc

SEQ ID NO: 2268 - DNA, 102 bp, synthetic construct
  source 1..102: mol_type = other DNA
ctatcctccgcggtggatagtgcgccgcataattgacgtaatcaatgtactttgccattgctaggacatatatggtgaatattgccattccctgactgaaga

SEQ ID NO: 2269 - DNA, 104 bp, synthetic construct
  source 1..104: mol_type = other DNA
cgatgccatataaggaagtaacaggaatactgacagatataggtactgaggaacttgcccatctcgagatgatctgcgccattgtgcaccagcttacccgcgac

SEQ ID NO: 2270 - DNA, 108 bp, synthetic construct
  source 1..108: mol_type = other DNA
acaatttcgattacaacgctttaaaaatcgcctctacgctttctttagcgtcaccaaacagcatcgaagtgttttctttaaagaacagtgggttctgaacgcccgcgt

SEQ ID NO: 2271 - DNA, 104 bp, synthetic construct
  source 1..104: mol_type = other DNA
aagctggtgtacaatggttgccaccatctcaaggtgggcaagttcttccgtaccaacatcagtcaatattgctttaagttctgggtacggcatactgtaacgct

SEQ ID NO: 2272 - DNA, 105 bp, synthetic construct
  source 1..105: mol_type = other DNA
caagtgcttctgtaactgaagggaataatagctctgttttgcctgctccacaaactgcccaaatcaaatattccgacagccctggtctcggattcgctacaaagc

SEQ ID NO: 2273 - DNA, 105 bp, synthetic construct
  source 1..105: mol_type = other DNA
gacttccctctgccatataggccatgatgatgatcggcactacaatctcatttgccgggaatccgaggataaaggccagcagtatgacgccgtccattccgatga

SEQ ID NO: 2274 - DNA, 113 bp, synthetic construct
  source 1..113: mol_type = other DNA
atatattcacaaattttggaaacagtacattgatttcaacagctaatatcacaatgcaatttggcgataagccattatttgaaaacatctcagttaaatttggtggtggcaac

SEQ ID NO: 2275 - DNA, 104 bp, synthetic construct
  source 1..104: mol_type = other DNA
gcagccgctgcgccagcatcgattttcccgaacccggcggtccgaccatcagcagattgtgaccgccggccgccgccacttcgagtgcccgcttggcggtctcc

SEQ ID NO: 2276 - DNA, 103 bp, synthetic construct
  source 1..103: mol_type = other DNA
aaaggcaggttgtgtcgtggggtatccgtcttatagcacatggcccactcgtggaggcaaaaacaatcgaaatgggctgtgcgggccatcgtgctggcgagca

SEQ ID NO: 2277 - DNA, 108 bp, synthetic construct
  source 1..108: mol_type = other DNA
caggtggcgactgcgaggcgggagtagatttgagggatggcagactccagttttgacatcgtctccaagatcgatcgccaggaagccgacaacgcgctcaatcaggcg

SEQ ID NO: 2278 - DNA, 112 bp, synthetic construct
  source 1..112: mol_type = other DNA
agaaatttcattttttattttttgatctgctcgtatactcattaagatttcattttcaatacaacgtgctgcataagtagcaagttttacacctttatccatatcataggta

SEQ ID NO: 2279 - DNA, 102 bp, synthetic construct
  source 1..102: mol_type = other DNA
tgcacaaaccgtccaccgatgatccgctgatcatcgtcctggtcgacgaaatcgccagcctcaccgcatatgtcgcgaacccgaagctgaaaaagcagatcg

SEQ ID NO: 2280 - DNA, 103 bp, synthetic construct
  source 1..103: mol_type = other DNA
ggtttttattcggttgatttgaagtatttctttaaagtaactttagcagtatttacaggagtgggccgtccgacagaagttgagggtcttgcgacttttgata

SEQ ID NO: 2281 - DNA, 105 bp, synthetic construct
  source 1..105: mol_type = other DNA
caaatgttacgaagcacttcgctacgattgatgagaagggctgtgctgcctatataaatatggtacaggggcaagtagaagcctatagagtggattttatggcat

SEQ ID NO: 2282 - DNA, 102 bp, synthetic construct
  source 1..102: mol_type = other DNA
atatcgttgccggacgagcccccgcgtcgacggtgtacgaggacgcggatgtgctggcgttcatggacattcggccgatgacgcccggccatctgctggtga

SEQ ID NO: 2283 - DNA, 114 bp, synthetic construct
  source 1..114: mol_type = other DNA
ggtgctgcagtcgccatgtgtctcggctttctcgatcattgaggagtgagaacgaagtcccacgggtcggaattgatgctgctgacctggacctcgacgtcgaagttctggtcg

SEQ ID NO: 2284 - DNA, 102 bp, synthetic construct
  source 1..102: mol_type = other DNA
gcaaaggcggcaaaaaggaaaacagcactcgcaaagcaagtgctgttttctggtgggggatggtggattcgaaccaccgaaggcgttgccagcagatttaca

SEQ ID NO: 2285 - DNA, 110 bp, synthetic construct
  source 1..110: mol_type = other DNA
gcgatgatcgccgcgatggcgcagggagacgtgcatatcatcagccaccccggcaacccgcgttacccgatcgacattcccgccgttgcggcggcggcggccaaatacga

SEQ ID NO: 2286 - DNA, 103 bp, synthetic construct
  source 1..103: mol_type = other DNA
gcacgcgctcgcggctttcgcgcacttcgagatcgggcagcccgacgatcgagaacgacggcagaccgttggcgagatggacttcgacggtgacttccggcgc

SEQ ID NO: 2287 - DNA, 123 bp, synthetic construct
  source 1..123: mol_type = other DNA
aggatagatggcaacctgcggatgagcatggttttcccagcccccggcggtcccataagcaggatattatgcattccggctgcagcgatgactaacgcacgcttggcgtgcagctgacccagc

SEQ ID NO: 2288 - DNA, 109 bp, synthetic construct
  source 1..109: mol_type = other DNA
ccgtttccggactggggttagtgatgcgttggcatcgcaagttcagatggttgcgggggcaggatttgaacctgcggccttcaggttatgagcctgacgagctaccggg

SEQ ID NO: 2289 - DNA, 104 bp, synthetic construct
  source 1..104: mol_type = other DNA
gcaggcgcgaagccaacagcgtcttgccgcagccagggctgccgatcaacaacagatggtgcccaccggcggccgccacttccaacgcgcgccgtgcatgcgcc

SEQ ID NO: 2290 - DNA, 105 bp, synthetic construct
  source 1..105: mol_type = other DNA
agctgtttcaccggtggtttctgaacatggtcgttcattggagaggtacagataaaatgcacgcgaacaacatttctccgctattggtgggcgcacaaggcacgc

SEQ ID NO: 2291 - DNA, 107 bp, synthetic construct
  source 1..107: mol_type = other DNA
ttcgctgaattttgagatgggagtcttactgcccgttaatgcgggataaaatatcccatttaataaagaggaaatagcaactaattgcctgggatacagatatgtaa

SEQ ID NO: 2292 - DNA, 102 bp, synthetic construct
  source 1..102: mol_type = other DNA
aatagtcttgctactaatcaactaacgtaaaagccgtgactacctccacgtgagttgtctgtggaaacatgtcaacaggttgcacatcttctaatttataac

SEQ ID NO: 2293 - DNA, 108 bp, synthetic construct
  source 1..108: mol_type = other DNA
agccttcagtgcgaagttcggtcaggatacgttcggaatccaccaggtttttcggacagcccagcgagacgaagccgattttcggctggtgcgtaacattgctcatag

SEQ ID NO: 2294 - DNA, 111 bp, synthetic construct
  source 1..111: mol_type = other DNA
tcttctgaatataaatccatttttgatatatctatagatcctgttaatattgaagtatcttgattgttaggatccactggaggcacaacaccaatacctttccttgagcga

SEQ ID NO: 2295 - DNA, 103 bp, synthetic construct
  source 1..103: mol_type = other DNA
cgccccgaccggatcgtagtcggcgaggttcgcggcgctgaggtcgtcgacctgctgacggcactcaacacaggtcacgacggcggtgccggaacggtgcacg

SEQ ID NO: 2296 - DNA, 105 bp, synthetic construct
  source 1..105: mol_type = other DNA
gatcatagcgaccaccctctttgggtaagtctgccggggccagactgacggtgatccgtttcgcgggaaaactaaaaccgctgttgattaatgcgctccgaaccc

SEQ ID NO: 2297 - DNA, 103 bp, synthetic construct
  source 1..103: mol_type = other DNA
ctattgtgttttttcggtaaaggtctccgactgagctatagtcggagactattcatccttgttgctggggctatgctcaaagtggttaggtttgttcattcaa

SEQ ID NO: 2298 - DNA, 102 bp, synthetic construct
  source 1..102: mol_type = other DNA
tgtagtactacctatcacgaatacgtagtactacatatcgtctataggtagtctacgtatagacaatagatagtgactaccaacagatactttgctatatgt

SEQ ID NO: 2299 - DNA, 105 bp, synthetic construct
  source 1..105: mol_type = other DNA
gccttagtgaagaagccgaaatcataatgtttgagcgaggaccattcgtctcttttgccaactgtggattgccataccacataggtggcgatatcgaggatagaa

SEQ ID NO: 2300 - DNA, 105 bp, synthetic construct
  source 1..105: mol_type = other DNA
tctcatctttaatatttttataggctgacatgagggtactatggcggttgtactggttcacttccccatatccaaacatattacacttcttcattaactcttcga

SEQ ID NO: 2301 - DNA, 104 bp, synthetic construct
  source 1..104: mol_type = other DNA
cgaggcgtgtcccgtctgcggcgatgaggtgcgcagcgtgttcttcgccgacaactccctcgagtactgccccacctgccagacgggcggaaagctgctcgccg

SEQ ID NO: 2302 - DNA, 107 bp, synthetic construct
  source 1..107: mol_type = other DNA
cctcctgctgttcatctacctcgagctgggcgcgatggtcggtatctacttcaagaccaaccacatgccggtacgcttcctgatctacgtggcgatgaccgcgctga

SEQ ID NO: 2303 - DNA, 105 bp, synthetic construct; identical to SEQ ID NO: 1827
  source 1..105: mol_type = other DNA

SEQ ID NO: 2304 - DNA, 105 bp, synthetic construct
  source 1..105: mol_type = other DNA
cataaggagcagatatggacagacaacaaggcttcacactcattgagctgatggtggtcattggcatcattgcgattctgagcgccatcggcgttcccgcctatc

SEQ ID NO: 2305 - DNA, 107 bp, synthetic construct
  source 1..107: mol_type = other DNA
gggccgataggaaataaaaaaaggcttccgattgctcggaagccttatctgtggagctaaggggattcgaacccctgaccctctccatgccatggagatgcgctacc

SEQ ID NO: 2306 - DNA, 100 bp, synthetic construct
  source 1..100: mol_type = other DNA
cggacatggcgtttctgggggtggagcgggtgcgggtgctgcacctgaacgcgcgcaacatgctgatccgcgacgaaaatatgggcgacgggtcgatcga

SEQ ID NO: 2307 - DNA, 107 bp, synthetic construct
  source 1..107: mol_type = other DNA
ttttcaaattcttccctcaatttcccaattgcctttttttcgatccggcttacataggacctggaaatgcctaaaactcctgctacttcccgctgggtgtgctcttt

SEQ ID NO: 2308 - DNA, 110 bp, synthetic construct
  source 1..110: mol_type = other DNA
cgagggcgtggcggaagccgcggtggtgggagcgtccgacgagacgaccggccaggccgtggtcgccttcgtcatcatcaagagccggtacctctcgcagaagcccgtcg

SEQ ID NO: 2309 - DNA, 147 bp, synthetic construct
  source 1..147: mol_type = other DNA
gaaaatggattgatgagaatcaaaatatttgtttcgcctacctcgcaggcaaagccctcggagttgatttagtgaaagtggtggaggggtgaaaaaaaatggtatttatctacaccaatgaatggcaaaacagaaaaagaaatacaa

SEQ ID NO: 2310 - DNA, 103 bp, synthetic construct
  source 1..103: mol_type = other DNA
accaatggcgtacatacgtggagtgtgccatcaggacagccttactactggcatccagattggctacacgttgccgaagatgcgacagggtcacacccaaaag

SEQ ID NO: 2311 - DNA, 105 bp, synthetic construct
  source 1..105: mol_type = other DNA
cgggcaagcgccggctgctcgaggccggcggccgcaaggagatcgcgatgatggtcccggtcgtcttcctggtgctcccggtgaccgtcctcttcgcgctctacc

SEQ ID NO: 2312 - DNA, 114 bp, synthetic construct
  source 1..114: mol_type = other DNA
gttattaggctataatgcggcaattgataacgtctgaaaataccatgcagaaaacttcttttagaaatcaccgggttgaacgattcagcacacgacaagctgccaggacgcgta

SEQ ID NO: 2313 - DNA, 107 bp, synthetic construct
  source 1..107: mol_type = other DNA
ttgaaggaaggagatttatatgaaagttctcgttattggcggtggatgggctggctgcgcagctgctattacagctaaaaaggctggagcagaggttcatgtttttg

SEQ ID NO: 2314 - DNA, 102 bp, synthetic construct
  source 1..102: mol_type = other DNA
acctattttgttcacaatattatatcaccactccattacaatggtccacctcatgctgtattatctgtgccgtaaatccgctgtattttccatgctgcggct

SEQ ID NO: 2315 - DNA, 110 bp, synthetic construct
  source 1..110: mol_type = other DNA
ccgccggcgagacgtcccgatcatgatttcggtcggctatgccgcctgtcactggtgtcacgtcatggcgcacgagtccttcgcggacgagcaggtggccgagctgctga

SEQ ID NO: 2316 - DNA, 111 bp, synthetic construct
  source 1..111: mol_type = other DNA
tcatcgttggtttgttactcggcttaccgcttacaaagattccccaaactattgaaactgggatcgggggccagcttggacacttagctatcatcttcggtttcggttcaa

SEQ ID NO: 2317 - DNA, 108 bp, synthetic construct
  source 1..108: mol_type = other DNA
gcaaggcccgcatcgagggcaaggagtacgtcatgcaggacggcgacgtggtggagtttcggttcaacaactgacggccgattccgcagctaaacgcagctcgcccgt

SEQ ID NO: 2318 - DNA, 115 bp, synthetic construct
  source 1..115: mol_type = other DNA
aagcagaagctaacgaaatcaaagaaaaacttgaagctgcaggtgcttcagttactcttaaataatcatctattggttgtttaaaggtgaaagcctagttttaaagtcttttcgt

SEQ ID NO: 2319 - DNA, 109 bp, synthetic construct
  source 1..109: mol_type = other DNA
tgggtattgtaaagttttattataagtccacattagcacattcctccttcccaaggccatggttcttcaagccatctccatttattacatgggtaatttattgttaatg

SEQ ID NO: 2320 - DNA, 107 bp, synthetic construct
  source 1..107: mol_type = other DNA
gaccttggcgcggggaacgaccccggccgccgcgagcagggccacagcgatcgccaggtcgaacacgcttccgcgtttgggcaggctggcggggaacaggctgacgg

SEQ ID NO: 2321 - DNA, 116 bp, synthetic construct
  source 1..116: mol_type = other DNA
aaggtatcattgctaagtcagaaatgcttggtgcagtagcaatggttattccaactaacgaagaattcgttattgctcaacaatcggtagaacttctgtaatctagccattgctta

SEQ ID NO: 2322 - DNA, 105 bp, synthetic construct
  source 1..105: mol_type = other DNA
agatgcccgccacccagcgggtgctgttcctgtggcgcaatgccgataccgtggtcatcggccgcgcgcagaacccgtggaaggagtgtaatacccgccgaatgg

SEQ ID NO: 2323 - DNA, 102 bp, synthetic construct
  source 1..102: mol_type = other DNA
ctatgccatacagggaagttgccgggctgcttacagatatcggcactgaggagctggggcattttgaaatgattagcacaatggttcaccagctcacaagaa

SEQ ID NO: 2324 - DNA, 102 bp, synthetic construct
  source 1..102: mol_type = other DNA
catcatcaacaagagctaaaatattgtcataagttgttcttgccttttgttccgccgccatatcttcagttaaatcagttattgggtcacctttagattgga

SEQ ID NO: 2325 - DNA, 114 bp, synthetic construct
  source 1..114: mol_type = other DNA
cactttacgacgcgggccgagcgagctcggggttctccggttccctcagaaactgtttggtgcggtcgagaagactcgaacttccacggccttgcggccacaacgacctcaacg

SEQ ID NO: 2326 - DNA, 105 bp, synthetic construct
  source 1..105: mol_type = other DNA
agctgaaagctttactgaacccccagcctagctgggggttttctgggcacaaaaaatggagcaaacgacggacgtcttgctccattaaaataaagtaggtaccac

SEQ ID NO: 2327 - DNA, 104 bp, synthetic construct
  source 1..104: mol_type = other DNA
ggacccgctcgcgggcttcggagacggccttgtccggcagcccgacgatggagaaagcgggcagccccggcgcgacctgaacctgcacatcgacggcgcgcgcc

SEQ ID NO: 2328 - DNA, 103 bp, synthetic construct
  source 1..103: mol_type = other DNA
aggtgctcaacctgctgctgatcgatttcaaaggtggcgcaacgtttctcgacctggcccaggcaccgcatgtggccgcggtcattaccaatctggccgacga

SEQ ID NO: 2329 - DNA, 108 bp, synthetic construct
  source 1..108: mol_type = other DNA
gtggggaacaagaacaaggttgaatagtatcaccgtagtacccgcagggacagggattggtacttgcgactagggtaaattgagccggaaaagcaacagattgacggg

SEQ ID NO: 2330 - DNA, 103 bp, synthetic construct
  source 1..103: mol_type = other DNA
aatcaaaacgtcccccctctttgggtaaatcggctggcgctaaattgaccgtaatgcgcttcgctggaaactcaaagcgagaattgatgatcgcgctgcgcac

SEQ ID NO: 2331 - DNA, 109 bp, synthetic construct
  source 1..109: mol_type = other DNA
cccagccggtcggccagcttggccggtccggcgaaggcgctctccatggtcacctgctggtcgaggagcatcccgacgagcagagcgaagcggtcttcggccaacagcg

SEQ ID NO: 2332 - DNA, 102 bp, synthetic construct
  source 1..102: mol_type = other DNA
cgtcattctagaatcatgctcattgcatgccttcattcattcccagaaataagaaacaggagatatatacgggcgaatgccccggaacgtcactcatgcaaa

SEQ ID NO: 2333 - DNA, 111 bp, synthetic construct
  source 1..111: mol_type = other DNA
gattagtattgcttgagcaagtgtatagagcatttcgtattaatcgtggggaaccgtatcataaatagtaatagtacattcaaacggctacagatgtggccgttttctata

SEQ ID NO: 2334 - DNA, 102 bp, synthetic construct
  source 1..102: mol_type = other DNA
gctcagccgccgcccgggcgacagcctgaatgtcgatagggtatttcgggttacccggatggctgatgatatgcacgttgccgctggcgatggtagcaatca

SEQ ID NO: 2335 - DNA, 102 bp, synthetic construct
  source 1..102: mol_type = other DNA
ctatcctccgtggtggatagtgcgccgcataattgacgtaatcaatgtactttgccattgctaggacatatatggtgaatattgccattccccgaccgaaga

SEQ ID NO: 2336 - DNA, 105 bp, synthetic construct
  source 1..105: mol_type = other DNA
tacgcaggaagggaatttcaaagcaggtcgctttgccttaatttctgctgatgaactgatcgtagctcatacaaatgaaacggagtatcgttcatttatttctaa

SEQ ID NO: 2337 - DNA, 105 bp, synthetic construct
  source 1..105: mol_type = other DNA
ccgtcgagcgggcgacgccggtgacgtcggtgagggtcgtcgccaggtaggtgtagacggcgaagcacccggcgaagccgacggtagcgacgatcagcgtcagcc

SEQ ID NO: 2338 - DNA, 103 bp, synthetic construct
  source 1..103: mol_type = other DNA
aaagcgataaggttgaagttttgagtgccgagattgttggaacacatgatgatctattaaatcctgaaccaatttacaataaagaagaaaaagaaataatgat

SEQ ID NO: 2339 - DNA, 59 bp, synthetic construct
  source 1..59: mol_type = other DNA
catgtggagtgtgttgctctgcttgttaaagcctagaactctttgataaatggaaatag

SEQ ID NO: 2340 - DNA, 103 bp, synthetic construct
  source 1..103: mol_type = other DNA
tctaaagcatcatagtgagttctctccataccatgcgaagcgtgaactccaggacctataaggccaccttttatattatttccacctcgtaaggcagctccaa

SEQ ID NO: 2341 - DNA, 106 bp, synthetic construct
  source 1..106: mol_type = other DNA
caggagagcgccaagcgggcgctggagatcgcggccgccggcggccatcacctgctgatgatcggcgcgcccggcgccggcaaatcgatgctggcggcacgcctgc

SEQ ID NO: 2342 - DNA, 110 bp, synthetic construct
  source 1..110: mol_type = other DNA
tagaaacaaatatcgtgtttcgtataaaattgatttcttacaatcattctgcggagagacggggattcgaaccccggataccctttaggggtatacacgctttccaggcg

SEQ ID NO: 2343 - DNA, 102 bp, synthetic construct
  source 1..102: mol_type = other DNA
tataaacgccaatcttaccgcctggtagagcaaaagcattaacttgtggagaatcaaaaaccacaacctcccatgatgtgaaactttcttgctgaggaactt

SEQ ID NO: 2344 - DNA, 107 bp, synthetic construct
  source 1..107: mol_type = other DNA
aacgcccgcgccgcgagcacgtcgacgcgcttctcggtgcactgcggcaggtccaggatctcgccggggtaccagttgttgacgacctcgtggtcgtcccgctgcac

SEQ ID NO: 2345 - DNA, 103 bp, synthetic construct
  source 1..103: mol_type = other DNA
agttgccggagttcgatcgccgtgtgctggaggttttgcgtgagccgctggagtccgggcatatcgtgatttcccgggcgcgggatcgcgtgcgctttccggc

SEQ ID NO: 2346 - DNA, 102 bp, synthetic construct
  source 1..102: mol_type = other DNA
ccatgccgtatgacagtgtacgtgcgatgttaacggatatcggaacggaagagcttgctcatctggaaatggtatccgcaatcctgtatcagctgaccagaa

SEQ ID NO: 2347 - DNA, 146 bp, synthetic construct
  source 1..146: mol_type = other DNA
aagaaaagcctgtatttcggcgctttcctcgaaatacaggctttatcattttggcaggggcagaaggacttgaaccctcggcacgcggttttggagaccgctgctctaccaactgagctatacccctattgatgttgtggactgca

SEQ ID NO: 2348 - DNA, 102 bp, synthetic construct
  source 1..102: mol_type = other DNA
aggagcggacgatcggggcctcacgtgtgtgggtgctgcccaatcccagcgggctgaacgcgcactggacggcggcgacgatggcggaggagttcgggcggc

SEQ ID NO: 2349 - DNA, 114 bp, synthetic construct
  source 1..114: mol_type = other DNA
cggaaaaaacccacggatggcggcgcaataacgatttttcgcgccctttggctaacactaaacgtacactcataatttgctatgctgatttcagagaaaatgggcgccattttc

SEQ ID NO: 2350 - DNA, 106 bp, synthetic construct
  source 1..106: mol_type = other DNA
cttgacccgagaatccacaacccattgcgatcaatggatcctcgggtcaagcccggggatgacgtcgaatttggagcgatattcgcaagaattatcaggcccgcct

SEQ ID NO: 2351 - DNA, 105 bp, synthetic construct
  source 1..105: mol_type = other DNA
aaggactcattgcagctcgtcccctgcgtgcaccacaccatacgattacccaagccgctcttgcaggtggaggagcccaagtccctcgtccaggtgagtgcagcc

SEQ ID NO: 2352 - DNA, 122 bp, synthetic construct
  source 1..122: mol_type = other DNA
atcaacctgatggaaggttatgggaatgacaaccctggtgctaaatctcaaggcattaagcaatttatggcaggagcagggattatcttacttgctcaattactagtacctcaattatcagg

SEQ ID NO: 2353 - DNA, 105 bp, synthetic construct
  source 1..105: mol_type = other DNA
ctattgccagagcattggtatcagatgctccaataatactagctgatgagcctactggtaatctagacagtgttactgccggagaaataattaatatattaaaga

SEQ ID NO: 2354 - DNA, 112 bp, synthetic construct
  source 1..112: mol_type = other DNA
aacaacttccgcggcaacttcttcgccgcatcgagaaccgacaacgacagagccaaatcgtaaacactgcccaccttcggcaacgtcgccggcgacaacgccaaaatcacct

SEQ ID NO: 2355 - DNA, 103 bp, synthetic construct
  source 1..103: mol_type = other DNA
tcttcatatgtaacctcattggtatccagccattgtttagctttacgacatgtactgcattttgcgtaactatacaaacgaatatttggtgcgtttgtcaaaa

SEQ ID NO: 2356 - DNA, 102 bp, synthetic construct
  source 1..102: mol_type = other DNA
agatcgaaaaaggattcattatggttacactttacggcatcaaaaattgtgacaccattaaaaaggctcgccgttggctggaagccaataacatcgactatc

SEQ ID NO: 2357 - DNA, 102 bp, synthetic construct
  source 1..102: mol_type = other DNA
gcggagtcaaacgggcactcgaggtggctgcctgcgggggccacaacctgattatgataggtccgccgggaagcggaaaatcaatgatggccagggcgctgc

SEQ ID NO: 2358 - DNA, 104 bp, synthetic construct
  source 1..104: mol_type = other DNA
acccatccgttttctgcgtgaacgggagatcgtccatttccagcgcttcggcgaggcgctggaaaccgtcaaggacaccctggacagccgcaatttttatgccg

SEQ ID NO: 2359 - DNA, 108 bp, synthetic construct
  source 1..108: mol_type = other DNA
tgtaccgctgggacaggtaacgcatggaggcgccggactccccgtcggggcctccgtattgactgataatcattgccgcaagtgccggattgggattcttaatatgaa

SEQ ID NO: 2360 - DNA, 114 bp, synthetic construct
  source 1..114: mol_type = other DNA
ccgaaatcctccccgccgacaccacccgccccttctacccggccgagggctaccaccagcagtacctcgacaaaaacccgggcggctactgcggaatcggcgggaccggcgtga

SEQ ID NO: 2361 - DNA, 108 bp, synthetic construct
  source 1..108: mol_type = other DNA
cgatgttcttcttgggcaccgacaggttgcacgccgggcaacggtgccagaagcaccccataacgaaaatggccttcttacggcccacaaaggccacgtcgggacggc

SEQ ID NO: 2362 - DNA, 109 bp, synthetic construct
  source 1..109: mol_type = other DNA
cctcccggttcctctatttcccgaacgagaaccactgggtgctgacgcccgggaacgcgcaggtctggtacgagacggtactgtccttcctggccgagcacgtccacgg

SEQ ID NO: 2363 - DNA, 106 bp, synthetic construct
  source 1..106: mol_type = other DNA
gagcctctactattcatatgaacggctcttttcctgtgctaaaaaacgaaaggacggcatgccatgaatatattcgatcactatcgccagcgctatgaagctgcca

SEQ ID NO: 2364 - DNA, 108 bp, synthetic construct
  source 1..108: mol_type = other DNA
cgtcgttcccgtttggtggcatggaaaaccctcgcttgtcgtttatcacaccaacggttattgccggtgataagagcttggtttcattgattgcccacgaacttgcac

SEQ ID NO: 2365 - DNA, 105 bp, synthetic construct
  source 1..105: mol_type = other DNA
gggactctgtccggctctgacaacatggcttgcgtgagctatccgtacgcagccccagtttcgcagacgcttttcgatcgcgcggccgccgtgacccccggcggc

SEQ ID NO: 2366 - DNA, 111 bp, synthetic construct
  source 1..111: mol_type = other DNA
gcccgacggatcgcgtcgagcccctcctggacgccggcgggaacggtaatcacctgggcgtcggccaggctggcgcgcacctcttcctggaacttctcccgccgctgggcc

SEQ ID NO: 2367 - DNA, 117 bp, synthetic construct
  source 1..117: mol_type = other DNA
gcgaaaaaggaaaaattgttgttgaatgttgtcgtggtgtagcagaagcaatgttcaaagtaacacattatgttatgctttttgcaccaattggtatttttgccatgatttcttata

SEQ ID NO: 2368 - DNA, 106 bp, synthetic construct
  source 1..106: mol_type = other DNA
cgacggctttggtcgcgcgcttgacgacgtccatgacctcgtcccacttcccctcgacctcggtgaacatcgacgaggtgcggttcggcagcccggactcgcggac

SEQ ID NO: 2369 - DNA, 102 bp, synthetic construct
  source 1..102: mol_type = other DNA
acttccacaatctatatatgatttgaaatgctgtataggtttttcccgttcctgtagccataactagtagtattctatcctgaccttttgctatagcttcta

SEQ ID NO: 2370 - DNA, 116 bp, synthetic construct
  source 1..116: mol_type = other DNA
ggaggtcggccggctgccggacccggtcaggcgtcgacggcctccatgacctcgtcgctcacgtcgaagttggcgtagacgttctgcacctcgtcggagtcctcgagcgcgtcgat

SEQ ID NO: 2371 - DNA, 108 bp, synthetic construct
  source 1..108: mol_type = other DNA
actcgtaatagtcgctccagtagccggggcccaaatagccataggtcaggaacgggaagttgtgatcgtgcgcaagcccgtagaaaaagggcgcggttccgctcgccc

SEQ ID NO: 2372 - DNA, 102 bp, synthetic construct
  source 1..102: mol_type = other DNA
tgcccgcctacagcccgagctgcaggacgaagatgccggggaacagggcgaagacgatggtgagcgggaggatcaggaacaccagcggcaccagcatcccca

SEQ ID NO: 2373 - DNA, 113 bp, synthetic construct
  source 1..113: mol_type = other DNA
ggatgctgtgctgaccacgacggtcaccgtcatgaacgctagacgttaaaccggaactcgaccacgtcaccgtcctgcatgacatagtccttgccctccagccggagcttgcc

SEQ ID NO: 2374 - DNA, 102 bp, synthetic construct
  source 1..102: mol_type = other DNA
tggtgaaaaagaatacaccatgctatggaaacaaaaatagaaatcggaagttggagggataatgagatgaatataaaagattttaagtggacgagagaacct

SEQ ID NO: 2375 - DNA, 103 bp, synthetic construct
  source 1..103: mol_type = other DNA
attctatatttaaaataaatggacaaatatttatgggaatcgatcaaacaaatggtgttgaaattgagatgaatcctgcaatgtcattatatgtaacgtgtga

SEQ ID NO: 2376 - DNA, 109 bp, synthetic construct
  source 1..109: mol_type = other DNA
atccggtcggctatcttcttgggccctgcgaaagcaacctccatcggaatctgttgatccaggagcatcgctatcaatagcgccagcgggttgtcctccagcaactcat

SEQ ID NO: 2377 - DNA, 103 bp, synthetic construct
  source 1..103: mol_type = other DNA
aacgtatcatttcttttcaagaagatgcggtttgtaatcgtatccggaagttctgattcataatgtgttaccataatcatcgtcttatctttacgtttacaga

SEQ ID NO: 2378 - DNA, 113 bp, synthetic construct
  source 1..113: mol_type = other DNA
ctacacccgtagaagcttatgtgccgttatcttcggacaggggttcgactcccctcgcctccattagagtcaaaagccatcaaccagcgttctggttggtggtttttctgttt

SEQ ID NO: 2379 - DNA, 110 bp, synthetic construct
  source 1..110: mol_type = other DNA
aagtaaagggggctgaatcactgttatatccctcaccaacaacgcaaccgactccacatgcaccgtatgcgggaacatgtccaccggagttacctccactgtcttgtacc

SEQ ID NO: 2380 - DNA, 105 bp, synthetic construct
  source 1..105: mol_type = other DNA
gcattcggctaaagtcgccccccttcttcactggcatggggataaacacgtgtttgtaggctttgactacgggacagcaaactgctcgattgcagtaatgcgcga

SEQ ID NO: 2381 - DNA, 105 bp, synthetic construct
  source 1..105: mol_type = other DNA
cataaattttactcaatccaaaatcgtattgcattttcatcttgtgaaatgtttttccaaaactccagtggctaaagcgcgtaggcataccatacgccccaaatg

SEQ ID NO: 2382 - DNA, 102 bp, synthetic construct
  source 1..102: mol_type = other DNA
gttcctttgccttccatccggtgaagcttgatgggacggttatcgtcatcgatgatattgcaacgacgggcgcatcccttgaagaagcggcccgcctcctca

SEQ ID NO: 2383 - DNA, 104 bp, synthetic construct
  source 1..104: mol_type = other DNA
ttacagtaaacagttttattatttcaactgtctaccgcaaggggagcatatcagagcagaaggcttgaaggttctatgtttgtacctcatcagctaagaagcac

SEQ ID NO: 2384 - DNA, 105 bp, synthetic construct
  source 1..105: mol_type = other DNA
catcgatacgtaacattggcagatggccggtacaaaggtgcagatcggaggcattatgctttacactaagagccacaaattcatcgatatccatatcaatctccc

SEQ ID NO: 2385 - DNA, 102 bp, synthetic construct
  source 1..102: mol_type = other DNA
acacctgcctgatctccacctccgctccctgttccttccaatccagactgtccacatcccactgaatggtataatacccattctgctccgctgtttcaatca

SEQ ID NO: 2386 - DNA, 107 bp, synthetic construct
  source 1..107: mol_type = other DNA
ttatctctaaatgaacaagcttgcttagtacatcctggagtattatctcttggataaaaatatagtactacttttttatttttaaaatctgataaacttattaagtt

SEQ ID NO: 2387 - DNA, 110 bp, synthetic construct
  source 1..110: mol_type = other DNA
cgtctttttttattggtggacccgaagggattcgaaccctcggcctccgcgatgcgaacgcggcgctctcccaactgagccacgggcccatctctgtgcagacctcaaat

SEQ ID NO: 2388 - DNA, 105 bp, synthetic construct
  source 1..105: mol_type = other DNA
agctgcggacttttaatccgtaggttgtgggttcgagtcccacggggcctaccataaaaaccctggcatctcaacgaaagcgagaaccggggttttctcataccc

SEQ ID NO: 2389 - DNA, 108 bp, synthetic construct
  source 1..108: mol_type = other DNA
ggaaagtgtgtataccggaaacggtatcgcgggttcgaatcccgctccctccgccagaaattccaaaaaaccatgaaagctgctttcgtctcttggagcggcgcgctg

SEQ ID NO: 2390 - DNA, 105 bp, synthetic construct
  source 1..105: mol_type = other DNA
tactctcgtttttacgctattcacaggggctactcgtatttactggaccgactggatctgggaagacgacgacaatgtatgcattattagaagtaattagaaaaa

SEQ ID NO: 2391 - DNA, 110 bp, synthetic construct
  source 1..110: mol_type = other DNA
gccgggctcgggccgctccagccgtacctcgacgaccccgagatcgaggagatctggatcaacgcgctctcccaggtgttcgtggcgcgcggcggctcgtcggagctgac

SEQ ID NO: 2392 - DNA, 111 bp, synthetic construct
  source 1..111: mol_type = other DNA
gctcggcgacttcctcgtcttcaaagctttcgtgggccatgacgtggcaccaatgacatgtgcgtgtagctacccgagctagctatacccaatagatacgagaacaggttt

SEQ ID NO: 2393 - DNA, 108 bp, synthetic construct
  source 1..108: mol_type = other DNA
caaagaagtgcgtttagagatcatcggtgaggaaacggaagttgacaaaaatatcattgaacatatttctgatccgctgatgcatctgatccgcaacgcgattgatca

SEQ ID NO: 2394 - DNA, 100 bp, synthetic construct
  source 1..100: mol_type = other DNA
tacgactgggcagttacaagcccatgacctttaggtcgtgggtagttgacgaggcgtcctttctgtaatacatcgaattcttttaccacaaaactagcac

SEQ ID NO: 2395 - DNA, 111 bp, synthetic construct
  source 1..111: mol_type = other DNA
gtgctcactgaaatttttttaaagcttagtgctgttattaagcaacttcgattggaccaccgaatgaagtcactggtggaactttaccagtgaatttctcgaagtctacga

SEQ ID NO: 2396 - DNA, 107 bp, synthetic construct
  source 1..107: mol_type = other DNA
tagccctactcatatgagtgggctttttattttatgatttgtgatcacctgtcaaacctgctctatgcaaagctgtgcctccaggtgtataagaaacagctcgtaag

SEQ ID NO: 2397 - DNA, 104 bp, synthetic construct
  source 1..104: mol_type = other DNA
ctttgatcgcggtcgcggcgcgcgcaccactgcgggcccatcagcagcaggcgaacagtcggtggtgccgccgccgatatccacgaccagcacgcgctgctctt

SEQ ID NO: 2398 - DNA, 107 bp, synthetic construct
  source 1..107: mol_type = other DNA
gtcgtcgcgggagagaaagccgaagcccttctcgctgttgaaccacttgaccttgccggtgggcacgtctgtcctcgaactggtcggtgtgcggggagagccggaaa

SEQ ID NO: 2399 - DNA, 109 bp, synthetic construct
  source 1..109: mol_type = other DNA
tcgagcggctgccgcagcgcatcgagtgcgctggcggcgaactcgccggcctcgtcgaggaagagcacgccctcgctcgcgcgggcgatcgccccaggccgcgccacgc

SEQ ID NO: 2400 - DNA, 113 bp, synthetic construct
  source 1..113: mol_type = other DNA
tgcctggttgagcgcgttgtccgcctcctggcgatcgatcttggagacgatgtcgaaagagctgtcagccatgcgtggcagtctagccgcgcccgcgcgagcagaccccggat

SEQ ID NO: 2401 - DNA, 107 bp, synthetic construct
  source 1..107: mol_type = other DNA
aattgtagatgctttacaaacttctgataaatgtaaggttaatactcctgctaactggctaccaggaactccagttttacttccaacgcctaaaacttttgatgagt

SEQ ID NO: 2402 - DNA, 108 bp, synthetic construct
  source 1..108: mol_type = other DNA
aagattgccggacatggcggccagacttttgtacagtgcatggagaacagttgtaacccggcattgatttccgtcggcctgcggctcggtgtggacaattactaccat

SEQ ID NO: 2403 - DNA, 107 bp, synthetic construct
  source 1..107: mol_type = other DNA
ccttttacgggagtcgaccaacgtttatttgcacgtcggcgacgatcgccaatccgaaagagttggcggagcggctgatcggtgaaccggtggcgcttattgacaac

SEQ ID NO: 2404 - DNA, 107 bp, synthetic construct
  source 1..107: mol_type = other DNA
agtatgtccatatcttccagctaaacatattgaagattggggattagaagatcctactaataaaaatgatgacgagtttgtaaaaatagcaaaatcaattgaagaaa

SEQ ID NO: 2405 - DNA, 108 bp, synthetic construct
  source 1..108: mol_type = other DNA
cgccggacgtcaccgtcgaagtccatcttgccaacgggttgccgtcgttctcgatcgtcggcctgcccgacgtcgaagtccgcgaaagccgcgagcgcgtgcgcgccg

SEQ ID NO: 2406 - DNA, 109 bp, synthetic construct
  source 1..109: mol_type = other DNA
aaacaaattcttcatgacttcctgcaatattttctgccacgacaacacaggcatcattcgctgaagcaattgcaatacatttaaagagttcaaagacactcattgtttc

SEQ ID NO: 2407 - DNA, 106 bp, synthetic construct
  source 1..106: mol_type = other DNA
cagcgattatgaaattaaaaggtacttaaataaactttctggaccccttttagacagaattgatatttttacctttgttccttctttatcttatactgaaattaag

SEQ ID NO: 2408 - DNA, 102 bp, synthetic construct
  source 1..102: mol_type = other DNA
gtagccggctggcgagcagggtcttaccggtgcccggggggccactgaacaacaggttatgcgcaccggccgcggcgatcagcagcgcacgcttggccgcca

SEQ ID NO: 2409 - DNA, 116 bp, synthetic construct
  source 1..116: mol_type = other DNA
gttcggcgagcggcgcacatcgaaacgcagttggaccgccgtctccgtcttgttgacgtgctggccgccggggccggaggcgcggatgaactcctcctgcaactcgctttcatcca

SEQ ID NO: 2410 - DNA, 105 bp, synthetic construct
  source 1..105: mol_type = other DNA
tcctgaccgccatgcggatcgaggacccggcgcggccgaccatcctgctctacggccatggcgacacggtccgcggcctcgcggaccagtggcgcgtggggctcg

SEQ ID NO: 2411 - DNA, 107 bp, synthetic construct
  source 1..107: mol_type = other DNA
taaaaatgaaatatgaaatagttgattgtatagatgctggaactgaatattgtccttgtcatttagcagaaaccggcgattgtattttatgttcagagctttgtagc

SEQ ID NO: 2412 - DNA, 111 bp, synthetic construct
  source 1..111: mol_type = other DNA
gcatcatcgcaaaatctgagctgcttaacgccgtagccatggtgatcccgaccaacgaagaattcgtgattgcccagcagtcggttgagttattgtaatagttacgacgaa

SEQ ID NO: 2413 - DNA, 102 bp, synthetic construct
  source 1..102: mol_type = other DNA
atgatgagttatgaaggattgaagaagtgtatcataagaaaggtgtaatcctgaagagacctttctattgatacactttccctctcagactgaaatcactta

SEQ ID NO: 2414 - DNA, 109 bp, synthetic construct
  source 1..109: mol_type = other DNA
tgtctgccagttccaacacatctgctttacaagcctactatagaatagtggcatgtctgacactattcgttagtaggtctgcattaattataggaaattaaccgtaatt

SEQ ID NO: 2415 - DNA, 113 bp, synthetic construct
  source 1..113: mol_type = other DNA
cttcttgaaaatctattataaataactttttacccgccttatgtatcttgttgccatagctgtatagatagcaacaagatacataactaaaaagaacataagcattttgccta

SEQ ID NO: 2416 - DNA, 104 bp, synthetic construct
  source 1..104: mol_type = other DNA
acactagctccttttttctttatttttcatacgtctaataaaaaatgacatacctactgcataaattataggacgtatgctataatcctcttaaacaaacgttt

SEQ ID NO: 2417 - DNA, 108 bp, synthetic construct
  source 1..108: mol_type = other DNA
ctctttggagaacctgattttaaggctgtacttgcgttatatagcatacccagtttgaaaaggtagtacgccatataactcctgtaatttcgtaaattcatctatttt

SEQ ID NO: 2418 - DNA, 104 bp, synthetic construct
  source 1..104: mol_type = other DNA
aataaggaagaactaaataagaactattttgtccttatttaagttctcccttaggagcattttaataaggacaattcctataaaatgctcctaaggtatttaat

SEQ ID NO: 2419 - DNA, 105 bp, synthetic construct
  source 1..105: mol_type = other DNA
atgaagattattttttaaagaatggaaaacgaaaatcgtatttctgcctgacattcggatgtccgtatgttgcctcaactacgatttcttagatacctctacgca

SEQ ID NO: 2420 - DNA, 102 bp, synthetic construct
  source 1..102: mol_type = other DNA
gggcccgcttcgggcaatccaacttgatcgaatctctgtcgatgagtatgtcattgctcagcgataaagaaaaaagtggccgtgccggtagaggtgactgat

SEQ ID NO: 2421 - DNA, 103 bp, synthetic construct
  source 1..103: mol_type = other DNA
tcctgtgtaatggtgcaaccccgacatggcgtacctactgtcggataggacatgaataccgacattagttggtgcaagcaaacttatccgaaaggataggctt

SEQ ID NO: 2422 - DNA, 104 bp, synthetic construct
  source 1..104: mol_type = other DNA
tgaacggcttgtaaattctcaaaatttttttagtccctacttgacacaagaagattattgtgcgataataggactaaatcagaaagaccttgaaaaccaaggca

SEQ ID NO: 2423 - DNA, 105 bp, synthetic construct
  source 1..105: mol_type = other DNA
tgtgatgacctgacaggcaaaccactaatggtgcttaactaatattggggctgcctgtgttgcttgttacactatacatatggaacttagcggtcaagctggaat

SEQ ID NO: 2424 - DNA, 119 bp, synthetic construct
  source 1..119: mol_type = other DNA
taaaattccattaccccggggtaattagtccactcccaaacaccaccgcacaggcagcgttgaataatagataacttttgggattgatactattcggcggaagaattgaataagtggct

SEQ ID NO: 2425 - DNA, 102 bp, synthetic construct
  source 1..102: mol_type = other DNA
cccgcatcggtcatttccggtgcaaatctcttctcaagtcgagtggagcagaggctacgattgagatgcgtcgacgagcgcttgatttgcctgaagataact

SEQ ID NO: 2426 - DNA, 106 bp, synthetic construct
  source 1..106: mol_type = other DNA
caagaatatttttctacctgcctattttttgttctggcaacagggaatgcgattgtagtacccttggcctttacccgatatatctctaaggaatctaagcaatgcg

SEQ ID NO: 2427 - DNA, 105 bp, synthetic construct
  source 1..105: mol_type = other DNA
ttcgacatgatggttatctagttcgataggggtcttttgtccatatcatgctcatattgaaaacaaaagaccccccggttcaattttgtttggtcccctgccctg

SEQ ID NO: 2428 - DNA, 121 bp, synthetic construct
  source 1..121: mol_type = other DNA
tttcataagtcagtattttcctttatcaaactccttttatttctgctgaatcatcttaaaatgctccaatgtcggcattatgttcagccacatacttctttatcatagtcaatggctgtcg

SEQ ID NO: 2429 - DNA, 108 bp, synthetic construct
  source 1..108: mol_type = other DNA
ccccaaagccccatgtcatgtgggtttctgacgtctacagcgcgtgtggatctggcccaagaaccacacggactgtacacccgttcctggagcatggccagacatcca

SEQ ID NO: 2430 - DNA, 103 bp, synthetic construct
  source 1..103: mol_type = other DNA
aattctagcgtggatattcagtttatttttagtgtttaatttattagtacgaacatatcgataatataaacacaaataaagcgctctatcatttgagataggg

SEQ ID NO: 2431 - DNA, 111 bp, synthetic construct
  source 1..111: mol_type = other DNA
tgttactttcatgtaacatctattttatttttgtctaaataaaaattggagaacatccacctatgtttatttagacaaaactattttattagattttcaaattttccagat

SEQ ID NO: 2432 - DNA, 106 bp, synthetic construct
  source 1..106: mol_type = other DNA
cctataaaagcagaaaaccctgataatcaggtgattatcagggtttattcgtacccctaagcgttcttttctcgaaccaattcttacatgatttggacttaatttg

SEQ ID NO: 2433 - DNA, 114 bp, synthetic construct
  source 1..114: mol_type = other DNA
aaaaagttaaaggagtagttaagatgaatgataaaaaacagcgtttttcatgtacaacaatatttattgtcgtttgtcaataatgcattaaaaattaaaaataatatcgatgtt

SEQ ID NO: 2434 - DNA, 114 bp, synthetic construct
  source 1..114: mol_type = other DNA
gatccttacttctagctctatttttatacactttttattatctactattcttttcgtaaggtgaaccttgtgtaataaaaagaatactatatttactatgaatttctaatctca

SEQ ID NO: 2435 - DNA, 105 bp, synthetic construct
  source 1..105: mol_type = other DNA
aaatttcatcaatatttttaaattgctactcattattccccataaaaattgtatccccagatacattttttatgtaacatttttaaatgtaaatataatatctat

SEQ ID NO: 2436 - DNA, 102 bp, synthetic construct
  source 1..102: mol_type = other DNA
acctctctaaaaaacatcgtactacagattgcaactagaacaagtttaatggagcaatattgttttagttgcaacttcaaatgacgaccctagatctttaaa

SEQ ID NO: 2437 - DNA, 102 bp, synthetic construct
  source 1..102: mol_type = other DNA
cttcaaatagcctaatgataaacaatgcagttaagattgtaaattggtgtgaacacaaatctacaatgtctactgcaaaacatgactataaaaacgggtgtt

SEQ ID NO: 2438 - DNA, 105 bp, synthetic construct
  source 1..105: mol_type = other DNA
ttaaattacataactataatcccttttttgtcataagcttgacatgagagggggtttcgtgtcataatagtgatagaggcaaatagttatgtaaatataaggagt

SEQ ID NO: 2439 - DNA, 108 bp, synthetic construct
  source 1..108: mol_type = other DNA
atggtaaaggaccggtcaagcggggaggggttttgtgatctgttcctccgaccagtcggagtcagcttgcacaaaacctgtcgctaggtcaagttctcgcaggtcagg

SEQ ID NO: 2440 - DNA, 110 bp, synthetic construct
  source 1..110: mol_type = other DNA
ggcatttgtatatttgaaaaaatgctaaggcttaaagtttcaatatgtttcaacaatggtcatcgtcatgatataatgaaacaatgaaccagactccacgagcttatgct

SEQ ID NO: 2441 - DNA, 105 bp, synthetic construct
  source 1..105: mol_type = other DNA
tcaaaagacgaaattattgattttaattaactacgcaatttacctttattaacatatagatacaggtaattaaggtagttaaatatttttgtttcaataataatt

SEQ ID NO: 2442 - DNA, 111 bp, synthetic construct
  source 1..111: mol_type = other DNA
actataatgttaattaaattaagtttaacatagatatcttttataaacaatgtatgaatacaaagttcactaaagatactttaattgtagtcaaaagaaaaaggcattcaa

SEQ ID NO: 2443 - DNA, 104 bp, synthetic construct
  source 1..104: mol_type = other DNA
ggggtgcctggaaattatattccaatctatgtattcatagcccagttatcctgatattgtgtctatgaatacataagttgaggcttggttgcctagtagaggac

SEQ ID NO: 2444 - DNA, 105 bp, synthetic construct
  source 1..105: mol_type = other DNA
ggatcgtccaggaggtgacgggcagggggagcttcagggccttcgcggtgtaatggattattatcgggcgtgaatagaggctaagccgttgatccgccgcatgga

SEQ ID NO: 2445 - DNA, 106 bp, synthetic construct
  source 1..106: mol_type = other DNA
aactaaagtgaaagattcgtatttagaaagattcctttgttggctttaagcacgcctagtgctaacaaaggaatctttatttttattctgagagtgtgaattcttt

SEQ ID NO: 2446 - DNA, 102 bp, synthetic construct
  source 1..102: mol_type = other DNA
gaccggcatatcgaaccaatatcaggtgctgtttaatagtctcccaaagtataccttgccccactaatgcacaagccctgcactaaaggttctcgccgccgt

SEQ ID NO: 2447 - DNA, 111 bp, synthetic construct
  source 1..111: mol_type = other DNA
attcatataagtcctccaatgcttcgtactgtatttgtagttgtgttgctactccaatccacatagaacaacagtattttatattataatatcaatacattctgcgtcact

SEQ ID NO: 2448 - DNA, 102 bp, synthetic construct
  source 1..102: mol_type = other DNA
tattcatagaacctcacaaatcaattaggcatatcttaccatacacttgcgaacaggcaaccactaacctatgcccagcgttttactaacatgaaatgccac

SEQ ID NO: 2449 - DNA, 103 bp, synthetic construct
  source 1..103: mol_type = other DNA
accgccggtcatccattggaatgtctagtttcatcttctcggtgcttcgctttagcgaagaacctagaagatgaaacactcatttttgatttcgcgcgtcaca

SEQ ID NO: 2450 - DNA, 108 bp, synthetic construct
  source 1..108: mol_type = other DNA
aaataaataaaatgtaaaaaattagtaagacctatatagttatataaaacaactgcaatatatatctatataggtcctgttaatttttgtaaaaagttctttgtgaac

SEQ ID NO: 2451 - DNA, 102 bp, synthetic construct
  source 1..102: mol_type = other DNA
cattaacactgtggttacatggtcgagttaatacaatatggtccatacttaaagtcttgtaccgtatttaattaatcttgtataccagaactctcagtagtt

SEQ ID NO: 2452 - DNA, 106 bp, synthetic construct
  source 1..106: mol_type = other DNA
tccacccctcagcatgccgagtgccagtatgacagggtgcgcgaaccacgtacgtcgtcggtgcaccctgtcatgacagtagcgacggaggtcatggcatgcaaaa

SEQ ID NO: 2453 - DNA, 106 bp, synthetic construct
  source 1..106: mol_type = other DNA
tgttgacctttaaggagtaaattaattatgggtccattaggacatttaaatagtttataataccctagtggaccccatatatttttcactacatttatatagagtt

SEQ ID NO: 2454 - DNA, 107 bp, synthetic construct
  source 1..107: mol_type = other DNA
gcggtcacgtcgggcagagtagcaaggtcgttagaccgacgggaacgctaagaagtcgaggatggttatacgacctcgcagctcggcgagcgtgagggcttttccgc

SEQ ID NO: 2455 - DNA, 107 bp, synthetic construct
  source 1..107: mol_type = other DNA
ggctcacacagaaaataataaacattctgagattatcaccttttcgaacttgggcaagccaaaattcattttggcaaagaaaatatcacataaatagtaatgataac

SEQ ID NO: 2456 - DNA, 109 bp, synthetic construct
  source 1..109: mol_type = other DNA
tttgggattttgagcccttcatcgcgcggctgtatcggattaccgacgatccggtggaccacattgcgctaattccgacacatgtctacgctggtcacatgcgattcct

SEQ ID NO: 2457 - DNA, 103 bp, synthetic construct
  source 1..103: mol_type = other DNA
attttaaaaaggtgaaaatgaaagaatgactgttttttaatcagaataactacactcattttaactaaacaacagtaattcgggtttgttaaccctaaacaag

SEQ ID NO: 2458 - DNA, 104 bp, synthetic construct
  source 1..104: mol_type = other DNA
cgaatatcaattagtggatgaacgaatcgttgcaaaagcaccgcagaatttaaggcctgataattggcaaactctttaccatgatcaacagtaatggattttac

SEQ ID NO: 2459 - DNA, 103 bp, synthetic construct
  source 1..103: mol_type = other DNA
atctttgatttcttttccctctcccttcccctataaaacgggtcttgccatgaagggcaggaaccgttttataggaagaaaacaggaagcaggcccggctgta

SEQ ID NO: 2460 - DNA, 104 bp, synthetic construct
  source 1..104: mol_type = other DNA
ccgccagccgttggcgatgcgctcacgggtctggctgagcagcgaatcgatgtggtcggcacccctccggtgacggccgcttgctgagttaggctgaaggctgc

SEQ ID NO: 2461 - DNA, 105 bp, synthetic construct
  source 1..105: mol_type = other DNA
ggagtactctcgattttttaatcaatagttagtgtaacgcacagggaatgttgataccatagagcttaaacaaactttttgagtccatatttaccatgagaaagt

SEQ ID NO: 2462 - DNA, 110 bp, synthetic construct
  source 1..110: mol_type = other DNA
atgggacggcgtgaatctttttattacgctttaaacctcacttttttgttatgcgtccaagcccatgcattataaaaaagtgatgtaatcaaatagcgcgtatatttcac

SEQ ID NO: 2463 - DNA, 101 bp, synthetic construct
  source 1..101: mol_type = other DNA
gtcgcctgttcagggggcgttcgggtgatcgaaggggttcatccctgtgggatgtggtcgtctaccggctcgggcggacggttgcgtgccataccggcacc

SEQ ID NO: 2464 - DNA, 108 bp, synthetic construct
  source 1..108: mol_type = other DNA
tcttcataacttgttctataacctgctttctaaaaagtgtagaacaagagtttatcttcagatttaattttgttccacactttgttttctttctaggtattctctgac

SEQ ID NO: 2465 - DNA, 110 bp, synthetic construct
  source 1..110: mol_type = other DNA
cctaaactcccccgagtttagggtttatgattgatagctatggtgtactgattcttccgttcactatagttatcgttcagaaattaacttatcgctatgccaattccttt

SEQ ID NO: 2466 - DNA, 111 bp, synthetic construct
  source 1..111: mol_type = other DNA
ataacccaaagttaccgaattaaaggtcactttaggttattatctctggtagccccacgggactaccagctttattgataaaaggttattaatccgaatacttaaataaag

SEQ ID NO: 2467 - DNA, 104 bp, synthetic construct
  source 1..104: mol_type = other DNA
aggaaaataaaatagataaaaaagaattcttctttatttctaccttcggatgtccgttggtagaagtaaataagaattctttaagataggaaatgtgagagttt

SEQ ID NO: 2468 - DNA, 105 bp, synthetic construct
  source 1..105: mol_type = other DNA
cacagatggattttagaagtaatattaatattttttaacttggtattggaacaccattactaacagtatagaataaaaaacaatagtgatttaactgttttactg

SEQ ID NO: 2469 - DNA, 102 bp, synthetic construct
  source 1..102: mol_type = other DNA
tcggcacaacctgtttgtattcgttggttttgagaatacaacagttaactgccattaacaagcgatttatcaaaactctgtaagcaagcatctccagtgctt

SEQ ID NO: 2470 - DNA, 104 bp, synthetic construct
  source 1..104: mol_type = other DNA
ttttagtggcatttcttacggttatttacacaacaaataccagcgtattataaagagtaagcggctatttgttgtatagaacaaaagccgccccttcatttagc

SEQ ID NO: 2471 - DNA, 114 bp, synthetic construct
  source 1..114: mol_type = other DNA
atttacaagcaaaaataaataaaatcactaaacatacaaaatagtaatttctattgcaataggaattactaatttgtatgaatataacatattgataatcaaaaatttatatat

SEQ ID NO: 2472 - DNA, 105 bp, synthetic construct
  source 1..105: mol_type = other DNA
catgactcggcctcatcgtctctgatggggtcacaataccaatcatgttcaagaatgtgaagggtattttacccctgtcgattcaatgacttagggcagcacttg

SEQ ID NO: 2473 - DNA, 110 bp, synthetic construct
  source 1..110: mol_type = other DNA
cttttgtataagctttttatttttcctttctgataaggcgacaggtcgcttcaacgtgccttgagtacactcaaaaacgtgtcacttaaacggttggtattactgcgttt

SEQ ID NO: 2474 - DNA, 111 bp, synthetic construct
  source 1..111: mol_type = other DNA
ctattcctagtcccacgccttacataataaaataaatatttcaatagattacctttcaaaagtcatgtaatctggtgaaacttaagttacataacaatttttgtgtttgtt

SEQ ID NO: 2475 - DNA, 113 bp, synthetic construct
  source 1..113: mol_type = other DNA
caatcgttgcgaatgccctggtcacatggtagttctatatgggtgactttggcatacggcttctaccgttgcgctaattatcccatagaggtctactgctggtcagagaacca

SEQ ID NO: 2476 - DNA, 102 bp, synthetic construct
  source 1..102: mol_type = other DNA
ctcacgaacgatcagatccgacatacgcacctcctttgtcaactatatctggggacaccaggttagtcaggggtgggtgggcggacgtgacctgacgtgacc

SEQ ID NO: 2477 - DNA, 105 bp, synthetic construct
  source 1..105: mol_type = other DNA
aagtgatgatggacaaattacaaaaattttgtgtcattagcttgacacaagggggtgcttgtgttattataatgacacaaggcagaaccccttataatacaaggg

SEQ ID NO: 2478 - DNA, 111 bp, synthetic construct
  source 1..111: mol_type = other DNA
ccaccctacatggtgaatttttttgtattttgggaatggacaatagtattaaggttctctatcgtattccctaaactttggtaaaatccccaacgctaatagcaacaaggg

SEQ ID NO: 2479 - DNA, 103 bp, synthetic construct
  source 1..103: mol_type = other DNA
tcgacgtccagccccctgaccagccaagttattactgcatgagcaggacttgatcgatgtcatacccggctcatacagtgattggcatgacccggcccaagtt

SEQ ID NO: 2480 - DNA, 115 bp, synthetic construct
  source 1..115: mol_type = other DNA
gaaccgctagacgaacgggccatatgtaatgaggctcggagtgcctcggataactcttggtagccccccgatcaacttgggcgaacatgccatctaccccgatgcacatggcctg

SEQ ID NO: 2481 - DNA, 102 bp, synthetic construct
  source 1..102: mol_type = other DNA
aggagaacaagtagttaaaatccattggctgttttaatgatacatttactctcgctaaggtatcataaacacaacaataaaataagatgtaaccattcactt

SEQ ID NO: 2482 - DNA, 112 bp, synthetic construct
  source 1..112: mol_type = other DNA
agtgctgagctacacaggggattgggcattgtgttaaaggtctgttactgttgcccaatgggcattaaaaaaaatacccctgcttcctttgttttatgggagaggaagcagg

SEQ ID NO: 2483 - DNA, 105 bp, synthetic construct
  source 1..105: mol_type = other DNA
acgtatgggttcagaaccgtccggtgagactgaacctatcggaacagtcagcctcaggcaagtgcatgaataggttcagatatgatgaccagcatggaagcggtg

SEQ ID NO: 2484 - DNA, 104 bp, synthetic construct
  source 1..104: mol_type = other DNA
aggatgacattataatcaaggggttaaacctatgctacccaaaactagattcatcaagccgtattagttggcatagggttaagctattgattcctataactaat

SEQ ID NO: 2485 - DNA, 102 bp, synthetic construct
  source 1..102: mol_type = other DNA
ttccatttaaaaacaacgagttattttaatgtgtagaaattcgtttaggattccctgcatgaatttctgcacatctaagtgaaatcatagctttatccccct

SEQ ID NO: 2486 - DNA, 105 bp, synthetic construct
  source 1..105: mol_type = other DNA
taatacggaaatcataggattacaacagcggctcttagtattgttcaatctccataggactgttaaaagcgccgctgccagcctccatcataacctcttgttttc

SEQ ID NO: 2487 - DNA, 109 bp, synthetic construct
  source 1..109: mol_type = other DNA
acgcttctccgctcagaaggcagccgacacgccgtgcatatgacgctgggttgcgcaggcggacctatcgttatatgcatggccgatcctgcccccacccgcgtcgcga

SEQ ID NO: 2488 - DNA, 109 bp, synthetic construct
  source 1..109: mol_type = other DNA
catggcgacctctggaagaagcttgggcggccattgtaaacatgtgaaatacctacaagcaacaatttcacatgtacacatattcaaagttcaggaaagcccagccgtt

SEQ ID NO: 2489 - DNA, 114 bp, synthetic construct
  source 1..114: mol_type = other DNA
tccgcgtattcacgcggcgcggagtgtctgttgacttacgcctttagcgtccgccgaagttcttagatgaccactaagagcgttactcccgtaggcaccctccccgccccaggc

SEQ ID NO: 2490 - DNA, 103 bp, synthetic construct
  source 1..103: mol_type = other DNA
gcacgaggggcatcgatcgtccagacttcgccgtcatggcctcgattcctcgcgcgcaatcggagccatgactgtaagtggcgttcgcccagtatgacaggcg

SEQ ID NO: 2491 - DNA, 105 bp, synthetic construct
  source 1..105: mol_type = other DNA
agtatgataatataaacctatcttaatgatgggtttatattataactagcatctgctaattataacgattacccattattaggtattaacttaataatgggtatt

SEQ ID NO: 2492 - DNA, 108 bp, synthetic construct
  source 1..108: mol_type = other DNA
aatcgggttgcgactcgttgagggtagagttcggtggaactcttttcgttcgcaccatttcacattttgatgtgaatatccccaaaaactcaaaaatttcagacactt

SEQ ID NO: 2493 - DNA, 106 bp, synthetic construct
  source 1..106: mol_type = other DNA
tgcactgatggaatttggttttatgtaaaatttattttagtgttcaatagtaatgtgataccttagaacactacgataaaaaataatggtactgacgatgcgaaaa

SEQ ID NO: 2494 - DNA, 107 bp, synthetic construct
  source 1..107: mol_type = other DNA
tgcccctccgtgcctgcttctacacagagagtacaacgaataaggcgaacccgtggttcggccttggtctattaacacgttggggcagggctcgggaatgacgaagc

SEQ ID NO: 2495 - DNA, 111 bp, synthetic construct
  source 1..111: mol_type = other DNA
atccatatgaaggtttaatttttattatatctattatagacatcctatatgaacagacgaataagctcattaatgatagaaataaagttgaaagttatggagaaattacaa

SEQ ID NO: 2496 - DNA, 110 bp, synthetic construct
  source 1..110: mol_type = other DNA
ttatagagcttgttccccgtcaatcaaaatcgtatctttgagattgccacggatcgccatggtgatctaaaagttactgttataaaaaagattttatgaatttcttttcc

SEQ ID NO: 2497 - DNA, 116 bp, synthetic construct
  source 1..116: mol_type = other DNA
ttcccttacctatggtaggaaaatagtataactcataagtattttacgtttcggcttcccgtttcgtttttacatacgagtagcatttattgtaattctataatgataataattct

SEQ ID NO: 2498 - DNA, 111 bp, synthetic construct
  source 1..111: mol_type = other DNA
cttgaccccttatgtgcccgccgttattgatccgcacatggggcgagcttggtgaagctcgacctaagtgcggtggccaagctgtttggccgccactaaagggcgaccata

SEQ ID NO: 2499 - DNA, 105 bp, synthetic construct
  source 1..105: mol_type = other DNA
tctgggataacctcacatttgttagatttggaggctacacaatcatcatagcatcccgtatgattacgggtgtaccaccatttctaacatttgttagatttttac

SEQ ID NO: 2500 - DNA, 102 bp, synthetic construct
  source 1..102: mol_type = other DNA
cgggcgtagatgacagcgtccataaaagagattctagctcaatcttgacacctgcgtaaaacgcgtttaggtttcttggtgtcaggaggtcacaccgacctc

SEQ ID NO: 2501 - DNA, 106 bp, synthetic construct
  source 1..106: mol_type = other DNA
gaggcttccttcgcggcaatcggtatcggtttactttaggttacagcgtccttggacgctgtagggctaagtataccaaattcgacgcgcccctaatcgcgccgac

SEQ ID NO: 2502 - DNA, 112 bp, synthetic construct
  source 1..112: mol_type = other DNA
ttgtgggttcatgttagaataagacatgggatgtcaacctatcagactgtgtatagaaccttaatactacacaaatactaatacgttgacacccaaaagacgtaaaaaaacc

SEQ ID NO: 2503 - DNA, 126 bp, synthetic construct
  source 1..126: mol_type = other DNA
ttttatgctaacctattgaagtttataggttattgcgttttgagttgtaaacaggaatcgtattcggtctctttttatattcttgttttcgttgggttttttcggtgctttcacgaaatcccacga

SEQ ID NO: 2504 - DNA, 106 bp, synthetic construct
  source 1..106: mol_type = other DNA
tatatagcctttaaatctatacttaaaattatcgctttttcatgtagtgagcatatgggcgctacatcaaagagcgcctttttttttaaaacaaatgagttttaca

SEQ ID NO: 2505 - DNA, 102 bp, synthetic construct
  source 1..102: mol_type = other DNA
actgcttcaagagatgatttattgtaaatacacctagaaagtactcatatataaaggtatatttactaaatatagtcattaagttaagattgagaaatgaac

SEQ ID NO: 2506 - DNA, 104 bp, synthetic construct
  source 1..104: mol_type = other DNA
ggtatgtggtagcgatgcggaaatattagagatttattggacaattcagtatgctaagtagtacgatgagtccatcaacaagcaacagaggcccaccgtgacaa

SEQ ID NO: 2507 - DNA, 108 bp, synthetic construct
  source 1..108: mol_type = other DNA
ataatgtactggttaaaagtaatttatgagcaatatataaaaaataatactaaaagtaattaatttttatatattgctcatatttaaaaaaaaatataaatataagct

SEQ ID NO: 2508 - DNA, 112 bp, synthetic construct
  source 1..112: mol_type = other DNA
atggagggcattatatgagcaatgcccgtaaatactataatgattctaagacttcttttagataaatcatagtattttgtgcattttacaataattcaatctgacatcaatt

SEQ ID NO: 2509 - DNA, 124 bp, synthetic construct
  source 1..124: mol_type = other DNA
taggtgactaacccgagagccgacaatggctctgagttgttgtttcatgtgtggcacagtacaacgtgaaggccgcacatacaacaacaaagatccagaagatcttggagcaggtacggagcta

SEQ ID NO: 2510 - DNA, 112 bp, synthetic construct
  source 1..112: mol_type = other DNA
aaccatgcaaccaagcttacgtgaacgagtgttgcaaccgcgatataagctagcgcatgtcgcggttgcaacactcgccttatcggtcgctctcgccgccttgcatgcggtc

SEQ ID NO: 2511 - DNA, 105 bp, synthetic construct
  source 1..105: mol_type = other DNA
tgcccaagaacaaagggaattctagcgaatgatatagtcgaaccaccaacgaactcgtagtctaactatatcattaatataaaggggactattttagcccccttt

SEQ ID NO: 2512 - DNA, 111 bp, synthetic construct
  source 1..111: mol_type = other DNA
tgccagagaacctaagccaaaatactgctaggttgtgttagtattggtttgttggtcttgacctagtggctgttactcacacatgccaccgggtagacttccaccattgct

SEQ ID NO: 2513 - DNA, 114 bp, synthetic construct
  source 1..114: mol_type = other DNA
acattaaaacagagtaaaaattttatataaaagcaatgaactgtatatacccaaatgggtataactagtttactgcttttttaccttataaaaatatctaaattgccgtcttta

SEQ ID NO: 2514 - DNA, 109 bp, synthetic construct
  source 1..109: mol_type = other DNA
tcctgctgcttaaaagggcaggatacaccgcagtgtcatttgatgaaaagctggtcccaacattttcataaaatacactgcgatctaatcccgcagacgctcaatggcg

SEQ ID NO: 2515 - DNA, 111 bp, synthetic construct
  source 1..111: mol_type = other DNA
gacgggacagtctgacacggcctaagacgcgcatctacaaagcatatcatccgacttgtcgcatgcaactaattgtagatacgcgcagtccgcaggttagtagatacaccc

SEQ ID NO: 2516 - DNA, 102 bp, synthetic construct
  source 1..102: mol_type = other DNA
aacccttaagaatcaatattttatgtggtttaagaaaacattatcctttgaagaaaggaatgtatttacttaaacaaaaaaaagagaagccgcctaccctct

SEQ ID NO: 2517 - DNA, 108 bp, synthetic construct
  source 1..108: mol_type = other DNA
ccttaatacttcgaaataaaaaatatgtttgggtatatgatgaagtgttgtactggtttaattgcctatcatatacccgtaaattccgttattcttgattaaacatag

SEQ ID NO: 2518 - DNA, 114 bp, synthetic construct
  source 1..114: mol_type = other DNA
aatactggcatcttcactatatttaacttattaaaaataaggagtcactctggtggaggtggagcagtaccttcgtgactccttaaagttttgaaacatcagttattatgtgca

SEQ ID NO: 2519 - DNA, 115 bp, synthetic construct
  source 1..115: mol_type = other DNA
ccctgttttcaatggcttgcagaattcagtggaactctacagaacctaaattggagcgggaaacgggactagaaccttgtccgtaactctttgattagaaaagagttttcgtttt

SEQ ID NO: 2520 - DNA, 106 bp, synthetic construct
  source 1..106: mol_type = other DNA
cttttttcatttaattttcctaagatcacaacagtaataagcagtatatcatggtgattatcaacagtaaattactgtaataattaaacgcagaaacaatatttaa

SEQ ID NO: 2521 - DNA, 104 bp, synthetic construct
  source 1..104: mol_type = other DNA
aagctttttcttggagagtaagagctttttatgattttgtatgttacgtgtggtgagaagtaaaagataaaaattctgataaagactacaccttaaaacggatt

SEQ ID NO: 2522 - DNA, 100 bp, synthetic construct
  source 1..100: mol_type = other DNA
atccattgtagcaggatggggtgtctttggccatccctcgacgaggtcgcgaagattggctgtgacaccccagggggacggctcattctacatacaaaaa

SEQ ID NO: 2523 - DNA, 105 bp, synthetic construct
  source 1..105: mol_type = other DNA
atacaaaagctcgcgaacctcggtcccgtgggtgttctgtcgtcgtgttgtacaattctgattcataacgcccatctttctatgttgttgaagggaataagcttt

SEQ ID NO: 2524 - DNA, 107 bp, synthetic construct
  source 1..107: mol_type = other DNA
acgtcacgcacatagactataaactttagatggggtttgtgggtacaggctcccgaacaacacaccaaaacccccacatatgccacgcctggcctcacccctgtttt

SEQ ID NO: 2525 - DNA, 105 bp, synthetic construct
  source 1..105: mol_type = other DNA
acatgtttctcgtccaaatgataacagttgagttgtttattatatagttgtcattagaaaagtaaataataaaccactctttttagagagagtggtttattaagt

SEQ ID NO: 2526 - DNA, 106 bp, synthetic construct
  source 1..106: mol_type = other DNA
atcctcacaccttctgtcctggttgtttagtggttactttttaaccatagacgactacgttcggttactttttaaccacctggatccggcgtgtcggtgtgagttg

SEQ ID NO: 2527 - DNA, 103 bp, synthetic construct
  source 1..103: mol_type = other DNA
attcccctacttgcattatagcaattcggggtgtctttgtcgatcttggacgtagccaacatcggctaggacaccccctgaccaggtcagtctacccctgtcg

SEQ ID NO: 2528 - DNA, 104 bp, synthetic construct
  source 1..104: mol_type = other DNA
atgaccgccgtaacatggttgatgtaaaaagtatcgctatctaacctcagcaaataatgaggtgtgatagcgatagcggcaaaaagctaataaaatcaatggtt

SEQ ID NO: 2529 - DNA, 107 bp, synthetic construct
  source 1..107: mol_type = other DNA
aactttttgtaaaaatatacttaaatataaacatacacaaattagtgcatcatatctttaatacatatatttgtgtatgttaataaattacatgataataactattt

SEQ ID NO: 2530 - DNA, 120 bp, synthetic construct
  source 1..120: mol_type = other DNA
ataagattacttggacaggtgaaaatataattatttcataactatttaaatccacccggaactcctggtggttttaaactgtaactattttaaaaacactttgagcaagctgtatatcct

SEQ ID NO: 2531 - DNA, 105 bp, synthetic construct
  source 1..105: mol_type = other DNA
aagcagcggtgcagcgcaccaaaaattttatgttttacttgacacattaggacgaatgagatataatagggcaaagtcggaaaccactatgaatggctgttgttt

SEQ ID NO: 2532 - DNA, 101 bp, synthetic construct
  source 1..101: mol_type = other DNA
tttaaggggataattcaaaacacaataatacatcaatacggaaatagtcctgacaacatttgcatagatgtatttttattgctaactttgcatcaaataat

SEQ ID NO: 2533 - DNA, 111 bp, synthetic construct
  source 1..111: mol_type = other DNA
ttagataacaaaaatgaacgaggtgtatatatatgggctttgctacagggattgtaggtctccctacaatccgagtagttaatcagcataccaggtaattaccacttcaga

SEQ ID NO: 2534 - DNA, 103 bp, synthetic construct
  source 1..103: mol_type = other DNA
tatcctgtggcaaatcttaaaattagaaaacatccttgtcaggcggagacgaagcggtctctttgataaggatgtttacgaaaaacaagtaagttaaggcaaa

SEQ ID NO: 2535 - DNA, 112 bp, synthetic construct
  source 1..112: mol_type = other DNA
ccatgctttcattagatttttacctgagagaatctgacttgcagattgtacacatgaataagttacaatgtcaattaaacacatcactttgagtagtcaaacaacaccacag

SEQ ID NO: 2536 - DNA, 101 bp, synthetic construct
  source 1..101: mol_type = other DNA
cagcgctgcggccgctgcccttggctccgttccgatcggtcctaaagctcggatacgaggttcgcttcgagaccccgcccggcgagcaggcgcaggtcgac

SEQ ID NO: 2537 - DNA, 110 bp, synthetic construct
  source 1..110: mol_type = other DNA
tttgatacttcgattttgaaactaatatatcacactattttagtttaagtgacgctaaagtcaaaactagtgagatattagatcatcttttgtgggatcgataaatcaca

SEQ ID NO: 2538 - DNA, 111 bp, synthetic construct
  source 1..111: mol_type = other DNA
gtggtgtctgtcacgcgacgatcctatctgcggaggtatgtgtgtcctgcctgatcgtccatgcgatcaagctggatgcacatacctagcacgttggggcaggtagcggat

SEQ ID NO: 2539 - DNA, 102 bp, synthetic construct
  source 1..102: mol_type = other DNA
acagtggcttgttctttttagcgtcttttctcaaaacgcttcccttcatttcattttacgggtatgatttgtgaaaagcagggatggcctgcaaggcacgaa

SEQ ID NO: 2540 - DNA, 104 bp, synthetic construct
  source 1..104: mol_type = other DNA
ttaaacacgctcaatcattttttaaaactatccgtgaaacacactccacatgtgttgaatactttttacagacaaaaaactaaaggcgactatatctacttgaa

SEQ ID NO: 2541 - DNA, 103 bp, synthetic construct
  source 1..103: mol_type = other DNA
catttgtacttccccatctcttatcgtggcgtacattatacactaactgttcccaattggtatagtaagtacgcccaaataaaattcattgctttcaatgcgt

SEQ ID NO: 2542 - DNA, 112 bp, synthetic construct
  source 1..112: mol_type = other DNA
tctcgaaagtggcttaaatagggcgttttgaaaaattttaatgcaaaaaaacaccaacctctcagtgcgtatgtttacatattaaaatgcactgattttggcaagatattcg

SEQ ID NO: 2543 - DNA, 109 bp, synthetic construct
  source 1..109: mol_type = other DNA
tgtagatcactgcttccaccggggaagcttatcaccccttccgaacgttccggccccagatagtttgataggggtgattgaggtgtcacctggggttttgttgatgata

SEQ ID NO: 2544 - DNA, 103 bp, synthetic construct
  source 1..103: mol_type = other DNA
tatggttgttattaatataaatttttaactttattttggcattgataagcatcattagtcatgctaaaataaagtaaattttgatttatcggtagacttcatg

SEQ ID NO: 2545 - DNA, 108 bp, synthetic construct
  source 1..108: mol_type = other DNA
agggtcgcgcggggcggctcggaactcatgtgctgagtctacgacttgcgcgggttgccgtgccactcctagactcaccacacgcccgcacgcgcgggaaagagaaag

SEQ ID NO: 2546 - DNA, 104 bp, synthetic construct
  source 1..104: mol_type = other DNA
ttcaaatcaactctaaattcacgtaaaaatcgttgctttgaaaaagcatagtgatattgttgctaagaagcaaaattgatactctctgctaagtgattgaaagg

SEQ ID NO: 2547 - DNA, 104 bp, synthetic construct
  source 1..104: mol_type = other DNA
tataaggtatttctttatttttatatttgggtatcacttattcaacaacaaccagtatgacctgtttttgtgatacctaattttatttttaaaaattgcttgga

SEQ ID NO: 2548 - DNA, 107 bp, synthetic construct
  source 1..107: mol_type = other DNA
ttttattttttagtatcaatatgatttaatgaggtttttagtgatatcaaacaccaaggtgttttcatatactacacacccagaagaaggaggaggaggagaaacgt

SEQ ID NO: 2549 - DNA, 108 bp, synthetic construct
  source 1..108: mol_type = other DNA
acgccgagaggaactagccatgcctaaatactgtgctagaacacggtgtgcggcaagaccaatcccacaatgtgacacacattattccggaccgaatgcccgaatatt

SEQ ID NO: 2550 - DNA, 106 bp, synthetic construct
  source 1..106: mol_type = other DNA
gctattggaaattctaagtttgtatttaagggtaattagtagatggcgacctatcatcatgtccgtattaccccacatcatattaacaatagcgattaaaatattg

SEQ ID NO: 2551 - DNA, 117 bp, synthetic construct
  source 1..117: mol_type = other DNA
ttttatgctataatatccctaaatgagaaaggagaaaatgtactatggtggtaatacctgtatataaatgtcgattagtaaatgacctctataggctgtgcatcttcatcaacacgc

SEQ ID NO: 2552 - DNA, 115 bp, synthetic construct
  source 1..115: mol_type = other DNA
tcttcttgagagcaatgtacaataaaatgtctaagattggatttatatcactcggctgtccaaaagtaaataatccaatctaaatattgagacaaaaaaagaggccgtagcctct

SEQ ID NO: 2553 - DNA, 109 bp, synthetic construct
  source 1..109: mol_type = other DNA
gtacggtagtttgcagaataggttttagtgcttgcctaattgatgaagacaccgaaggcaatgcaagctctttctgatggtcgagggtgtcgtaaaaaacgagtgaaac

SEQ ID NO: 2554 - DNA, 101 bp, synthetic construct
  source 1..101: mol_type = other DNA
agtattgaaatatagcatattacattagtgttaaatagagcataatattttgaaattatgatataaaaagcaggtggcaaaatgctaattcattatatttg

SEQ ID NO: 2555 - DNA, 111 bp, synthetic construct
  source 1..111: mol_type = other DNA
tatataaaggactcatggccacctttcagttaaaccgtgccaccctgtctgtcgctttcgcgactgtctaggtctcacgtttatatctcgggcggtcggctcaacctcggt

SEQ ID NO: 2556 - DNA, 116 bp, synthetic construct
  source 1..116: mol_type = other DNA
ataaagcgttcataacccattgattattataaatgtaaaaatattctcaacttcttcaagcgttgcataaaaatacatgttactctctgacataattctttccttaagtgaacaaa

SEQ ID NO: 2557 - DNA, 105 bp, synthetic construct
  source 1..105: mol_type = other DNA
ttcccgccacaaacctttctgacagtgggtattcttaaaaagaaacattcatatgcttgtttcttaataagaacactgtaaatacaaggcttttcaaagcctacc

SEQ ID NO: 2558 - DNA, 110 bp, synthetic construct
  source 1..110: mol_type = other DNA
acgtttgcgcaggtcagagcccctgcccgcaccacgatgttgacaagcagtaccggtgtctacgaacatgccttaacaacatcctccgctttcgccatagcgtgaaaagc

SEQ ID NO: 2559 - DNA, 114 bp, synthetic construct
  source 1..114: mol_type = other DNA
gatgcattttatgaatatttttaaacttaaataaatgaattttattaaatattctgtttataaaagagaaccattatatactttaaataaaaaaataagagtttatactaaaat

SEQ ID NO: 2560 - DNA, 105 bp, synthetic construct
  source 1..105: mol_type = other DNA
gtaaaaaaatagccagataatgggaacattattaatatttgttacgatacagcgttacgtcttttacgccaggatgtaacgaccgttacaccagcatgtaaaggg

SEQ ID NO: 2561 - DNA, 107 bp, synthetic construct
  source 1..107: mol_type = other DNA
ttaatatcaatcataaggagaataccatgagtgttaaggcaagaatactagtgcttttacatagctaaacacgtatgaggatgattcctagaacatccgaatcaact

SEQ ID NO: 2562 - DNA, 103 bp, synthetic construct
  source 1..103: mol_type = other DNA
cgggttaagtgaccaggccaggcccgctaacaccagtcggcttactcctgggagggtacagctccactggtccaagcgcagccgtatcccaaggcaacgtggt

SEQ ID NO: 2563 - DNA, 105 bp, synthetic construct
  source 1..105: mol_type = other DNA
gtccattccgctacctcgtgtgaagaatctgcaagcggtatcaggccgttgaactgcgcgcccggtaggcggtgggagcttcgtgtcaaagcggctgctggcgag

SEQ ID NO: 2564 - DNA, 106 bp, synthetic construct
  source 1..106: mol_type = other DNA
cccgcgtattttcggcatttctcagagatcatataaagcctggatgggcggaagaagcagcccattgaggctatacataataaagagttgtttctacctattatat

SEQ ID NO: 2565 - DNA, 111 bp, synthetic construct
  source 1..111: mol_type = other DNA
ctctcccatggaccagagcgtagggcagtttcaatctacgtatctacggattgccgtaggacaggttggttgagaacgctcggtcagggtgcttatggaggaggaacccca

SEQ ID NO: 2566 - DNA, 148 bp, synthetic construct
  source 1..148: mol_type = other DNA
cgtaagcgaggacaagagaaaactgataaatcaacaaaatcaaggagttcaatggcgcacccgacaggattcgaacctgtgacctttggaatcggaattggaagaatttggttataagtatttgatttttatatggtaaatttcacga

SEQ ID NO: 2567 - DNA, 107 bp, synthetic construct
  source 1..107: mol_type = other DNA
aagttgcatcaactcacctaactctcccgaaggaaattgttcttttttggcgaaccaatgtcaagtatttttcttcgggaaatgattttttgcttcagagcctctat

SEQ ID NO: 2568 - DNA, 104 bp, synthetic construct
  source 1..104: mol_type = other DNA
ggcacggtggcagactcgaaaacctatcggtacgtttaatctaccacggccagctatgacattcaattcgaaccgatatggcacgcgactagaacccgccagta

SEQ ID NO: 2569 - DNA, 114 bp, synthetic construct
  source 1..114: mol_type = other DNA
gaaatattaacccaactcaactatactcttttgttgtagttaagttgggtttaattgaccgaacaccatttaactacaacaaaaacaaaagagcacagcgtgtatataaagtgc

SEQ ID NO: 2570 - DNA, 105 bp, synthetic construct
  source 1..105: mol_type = other DNA
ctacccccaccttcgagggtagcgtttagctatgcccgttgcgactccccgactcactcaagagtcgttgaatgcataggtgcaaaccgtgatacgaatccgagg

SEQ ID NO: 2571 - DNA, 103 bp, synthetic construct
  source 1..103: mol_type = other DNA
aatactgactttttgcctgtttgctttccccctcttgaacaacctatcttcaagaacataagctatctgcgagaggggttctaccaacttccaatttattcga

SEQ ID NO: 2572 - DNA, 102 bp, synthetic construct
  source 1..102: mol_type = other DNA
cgactatgccgatattttacaggattacaaatcccttattgagttgcccttttgtgaggctcacttagggatttgatgaaataactatttttaagtgaagcc

SEQ ID NO: 2573 - DNA, 104 bp, synthetic construct
  source 1..104: mol_type = other DNA
tgatagatccttgctataaaaaacaagcatctattatatagctcataaagcgcgatttacgagcgatttcacaaacaaatttccaaccaaaaaacctatcacca

SEQ ID NO: 2574 - DNA, 104 bp, synthetic construct
  source 1..104: mol_type = other DNA
aaacccttgaataatggatattttctaagtcacctattccaactatccaacagatgttggatagtgcggaggggcgacaaacaaatacaaataaaaaagggact

SEQ ID NO: 2575 - DNA, 110 bp, synthetic construct
  source 1..110: mol_type = other DNA
aaaatagattttttacttccatatccctctataaagtcgcagtttagtacaattagcacctgcatattataccaaactgcgatatttaaagaagtatttaagagttttaa

SEQ ID NO: 2576 - DNA, 106 bp, synthetic construct
  source 1..106: mol_type = other DNA
atagattgcggcggtggccttgcgcttggtcatgtgtctagtctaacctctcgccagggcattagtacaactaagacgcccaaacgtaagaatgccccggcggtgc

SEQ ID NO: 2577 - DNA, 102 bp, synthetic construct
  source 1..102: mol_type = other DNA
aaaaagttttatcaatttatttaataagttgtatttataatacgttatcagttgttagcgttacataaatacaatgttactaatcacggttttatactgtcc

SEQ ID NO: 2578 - DNA, 105 bp, synthetic construct
  source 1..105: mol_type = other DNA
aagcggggtacatctatgcaggtcagacgttgctacgacgtactacttgcgtaggtgtttaaaacgtcgtagcatcatggtatggaatttccgccgttgagcccc

SEQ ID NO: 2579 - DNA, 102 bp, synthetic construct
  source 1..102: mol_type = other DNA
aggaacgtgagcaattaatatcagtattgcttctgtatgaatacagtccttaaggactgtattcatacagaagcaatacggatatttattgagggaaaccct

SEQ ID NO: 2580 - DNA, 102 bp, synthetic construct
  source 1..102: mol_type = other DNA
aatgctgttttcaaacaaacattcttaatgtataacatcatggtttctattcatacaaaccatgatgttatacataaagggtaaaaatcaaaaccgcatatg

SEQ ID NO: 2581 - DNA, 102 bp, synthetic construct
  source 1..102: mol_type = other DNA
taacctaagtttgttgctctgacaacattgtaatctattttacaccagtgaacaccaatgatttttagataacttagattaaaccaataccgaagatcaccc

SEQ ID NO: 2582 - DNA, 107 bp, synthetic construct
  source 1..107: mol_type = other DNA
gttttgtctagggtgtaaagtagtaatattatatgcaacattattctgtatttgaaaataaagagcaatgttgtacatcaagatacaacactactcaacaagtataa

SEQ ID NO: 2583 - DNA, 105 bp, synthetic construct
  source 1..105: mol_type = other DNA
aagtcgaacagaactctcaaacaataatgtacggtatttctccccaaaagtgcgagcactttttatcagatctaccgtttaatgacgaaaagaaggggttggccc

SEQ ID NO: 2584 - DNA, 101 bp, synthetic construct
  source 1..101: mol_type = other DNA
attctttgaagcaatatatgaacacccccacaaatataacacacactgacgagaaaagtaattttgtgggggtgttgtaaatctttatctttactagataa

SEQ ID NO: 2585 - DNA, 105 bp, synthetic construct
  source 1..105: mol_type = other DNA
ggggccgcttttgtgtgtgaagaatttgtttgtttacgttagccgttattcaaatgtatgatgtgttctacaaacaaatagttatcatgaataggataacaataa

SEQ ID NO: 2586 - DNA, 108 bp, synthetic construct
  source 1..108: mol_type = other DNA
tgtcactagtttacatcaactgcattgattggcatctatttatattatggcttgccataattatgtttgatgcgaatcgtttaactacctgatttatatttattataa

SEQ ID NO: 2587 - DNA, 102 bp, synthetic construct
  source 1..102: mol_type = other DNA
gaaagagtaaattctttttatgagtttttggttttcagtagagggcgtcagtaagcgccagttctgaaaaccgaaacatagatacatattatttaggaggaa

SEQ ID NO: 2588 - DNA, 117 bp, synthetic construct
  source 1..117: mol_type = other DNA
ccgcatcggtcgcacggctcaccagttcgaccatatgaacgtaacaatctgtcgaagtaccccgactacatgactttctcacgctcacatgccgtagagttccggacatgaccgttg

SEQ ID NO: 2589 - DNA, 116 bp, synthetic construct
  source 1..116: mol_type = other DNA
ttttcagcgagtgctatcgttaaaaccttaacgcaatgctcttatagcactggcatcattataataacggtattgatatgctaaaaacttgaaaaatattaataattattttccgg

SEQ ID NO: 2590 - DNA, 102 bp, synthetic construct
  source 1..102: mol_type = other DNA
gaagaataaaaaccttctatataatatatccctctgttgttccagtacgtgggcgtactggaaagacagagggataagtttttaaatttagcaaaacagcca

SEQ ID NO: 2591 - DNA, 103 bp, synthetic construct
  source 1..103: mol_type = other DNA
aaatctccgcttgtgcggattgagtatgttttacttttatatttaatgtttcaggattagatataaaagtaaaatagttagattttccattctatattgattt

SEQ ID NO: 2592 - DNA, 112 bp, synthetic construct
  source 1..112: mol_type = other DNA
agaaaaaaaccacagtttttcagcaattttgcataaaactgtggattaaaggtcgaggtgaaaggtgtccatatatagtcacataagcaaatttcagccaatgaaatgccca

SEQ ID NO: 2593 - DNA, 105 bp, synthetic construct
  source 1..105: mol_type = other DNA
acggtagccattcgagaatgcctcaggtgttggttcctatagcttaacacggctggctctaatctgtgataggtacagatatggatgatgagagcttcgacagtg

SEQ ID NO: 2594 - DNA, 102 bp, synthetic construct
  source 1..102: mol_type = other DNA
gaggaagaaaaaagtttaagaaaaatgttgtcaactgcttgacacaagagggggattgagatataatagtgacaagcttaagaaagccttataaatagggcg

SEQ ID NO: 2595 - DNA, 105 bp, synthetic construct
  source 1..105: mol_type = other DNA
gacggggcactctcaggcccgtcacagaagtacccgttatgagcttcgggaagccccgaagctccagagtcatagttctggagtgatcgccccatggtggcatcc

SEQ ID NO: 2596 - DNA, 108 bp, synthetic construct
  source 1..108: mol_type = other DNA
cgcgagatgcggaggtagagggctgtccgtgacatgcccctaaatctatcgtgctattagcgaaagtcaagttaagggtatgtagcgtgccaagaagcccgacatact

SEQ ID NO: 2597 - DNA, 106 bp, synthetic construct
  source 1..106: mol_type = other DNA
gcgcccatcagggcgcaaagaccgcagaatatctctggaggggaaattcatggtggtgcttgtagtctagtccgaaccactctctgtacccgaattcgatattcaa

SEQ ID NO: 2598 - DNA, 105 bp, synthetic construct
  source 1..105: mol_type = other DNA
acccgcatgagtctgaaaagatattcatctacgacgcgatgagtgtagtcctcgcgtcgtaggtgataatgcgagagcctacggatcgtccgagaaagactcgtc

SEQ ID NO: 2599 - DNA, 121 bp, synthetic construct
  source 1..121: mol_type = other DNA
cataaaatttgggagagcccttgctttaaaacttgccgttacagtcatcacggtgaaccgtatcacaaataacggcatgttttttggtggggaactgcataaaagacgtggaaaaggatta

SEQ ID NO: 2600 - DNA, 116 bp, synthetic construct
  source 1..116: mol_type = other DNA
tgccccggatgcaaggggaagggtgtgttcacggcgaggaccctactttccgcggcctgcgttcgcaagtcgcggagactcatacaaccgccgtgtacgacgctgagccctctacc

SEQ ID NO: 2601 - DNA, 117 bp, synthetic construct
  source 1..117: mol_type = other DNA
aagcgtttactggtcaagcagaagcttgccgattctttatacgaattgactacgccttcatgcaggcataacctgttcgtatagcgctatgatgcgctgtatacggcacaggagcca

SEQ ID NO: 2602 - DNA, 102 bp, synthetic construct
  source 1..102: mol_type = other DNA
gtagttctggtcagtggatactgcaaaggggtttacccttccacgactctgtaatgtcatgtaggattacacccctaccctctaccccagtgatcagccatg

SEQ ID NO: 2603 - DNA, 103 bp, synthetic construct
  source 1..103: mol_type = other DNA
tactataccgcaaaacctaaatcttaaaaacatccttaccaaaccctcacattagcaaggctttgataaggatggtagtagaaaaccagtaaaatcaaggctt

SEQ ID NO: 2604 - DNA, 108 bp, synthetic construct
  source 1..108: mol_type = other DNA
ccctgaagcctgaagctaacactgtaccgcgtataggtatggtgtcgctaggctgcccatgagtcactgcatatatacgttttcagggcaaaaaaagccgccacagcg

SEQ ID NO: 2605 - DNA, 115 bp, synthetic construct
  source 1..115: mol_type = other DNA
gggcgggccgggggttttgtttgctataaaccaggtgtgtttccggtggctcgcaggttcaatccaccggatacacaccctatataccatcttttcgggcgcatagctcagtggg

SEQ ID NO: 2606 - DNA, 105 bp, synthetic construct
  source 1..105: mol_type = other DNA
cactagccgcatgacctgcgacaacgatggaggcaaaacccaaaaccgtcccgacagtcttggtaattccctccaacggtggctctgaggtcgtcatgacgaacc

SEQ ID NO: 2607 - DNA, 103 bp, synthetic construct
  source 1..103: mol_type = other DNA
aaatcaactaaatgagagttattctcatgtgtgtatggtatcacaaaaccaaggtattgttaaatcatttacacatgataatagttctcattgtgaggcgatc

SEQ ID NO: 2608 - DNA, 145 bp, synthetic construct
  source 1..145: mol_type = other DNA
aatcgtctaaagtgcgtatttcaggcttttaggagctcatataaaaaaccctcataagccggaggtcgggagttcaagtctcccccgtgacaccatagatgtcctacttatcgatactttaactgccctttttgcagtttccctt

SEQ ID NO: 2609 - DNA, 106 bp, synthetic construct
  source 1..106: mol_type = other DNA
atataaatttgtcaaagaaattttgtttatgtccttgacaaatcttcccaaaaggattaaccttttagggacagagaaaataataaaaacttggaaaggaggtaat

SEQ ID NO: 2610 - DNA, 106 bp, synthetic construct
  source 1..106: mol_type = other DNA
aggcttttcgcatggctcatcaattatataatagataataggacacaatgtcctgacactatgtcctattatatgacaataaatatcatattatttttggctatat

SEQ ID NO: 2611 - DNA, 103 bp, synthetic construct
  source 1..103: mol_type = other DNA
tcgtgcatagaaaaaacgccaaaagacaatatgtattttgatataccctgcctgcagggtgctataaaatacataatcttcatgtgacatggtaatgtgcctc

SEQ ID NO: 2612 - DNA, 104 bp, synthetic construct
  source 1..104: mol_type = other DNA
tggcgcatgcggaggctgccccactgttcgggttaagaagcccaacattgagcatcgtcagcccttgaaaccccgaattatttcgtgatagctgtagggcatga

SEQ ID NO: 2613 - DNA, 102 bp, synthetic construct
  source 1..102: mol_type = other DNA
gtgatgcgaggccgccccaccccctgagtacgagttggcgaagcttgacgaccgtcacggttcgccagcacgtaccagcgccgggatgtccccaccaggggg

SEQ ID NO: 2614 - DNA, 109 bp, synthetic construct
  source 1..109: mol_type = other DNA
aagtcaaagtggcttatattcagcctttaagtatggttctatttttttactctttgctgatataaagtaaaatattatatcctaaaaatacataaaaaaataggctaat

SEQ ID NO: 2615 - DNA, 102 bp, synthetic construct
  source 1..102: mol_type = other DNA
ccattgataaaaaaaattaatttttttttgtttcttacttgacacgagcagatgagcgcgttataataaggacaaagttagagaaacccagtaaaatcaagg

SEQ ID NO: 2616 - DNA, 116 bp, synthetic construct
  source 1..116: mol_type = other DNA
cggggctctttgcgttccggtaccgcagacgtgcttatgtggaaacttcgggggtgtcgaacgtgccaccaaagacacgtcaggtagctacactgggcgcagagttaggggaggac

SEQ ID NO: 2617 - DNA, 102 bp, synthetic construct
  source 1..102: mol_type = other DNA
ataaagtagctagtagatagtagcgtttaaatatatttttaacacacatatcactggctgtcaaaaatatatttggctcgtttgaaagataatagccatctt

SEQ ID NO: 2618 - DNA, 108 bp, synthetic construct
  source 1..108: mol_type = other DNA
tcatgtatagacaccttagaaatttatgggtgtctttttgcaactatttacaggcaggacgttgcaacaagacgccgaaaaccctagtctccgctgcatccaatgtca

SEQ ID NO: 2619 - DNA, 105 bp, synthetic construct
  source 1..105: mol_type = other DNA
tccgccactcttccacagctaatacgtgatcgagtgtaggcatatccaacctgctaaggtaatatatacctacaccgcgtaggaaatttcccatggattgcgtca

SEQ ID NO: 2620 - DNA, 108 bp, synthetic construct
  source 1..108: mol_type = other DNA
tgtgtttcacctcatttaataagtatttatatacatcataataacatactttatctggagataaaacctcttaatataaagtgtttttaaaaatatgtatgatgtgtt

SEQ ID NO: 2621 - DNA, 108 bp, synthetic construct
  source 1..108: mol_type = other DNA
tattcttactagtgagcctaaacttgaattgtagttataggattttaagtacgtctaaaatcctctagtttcaattgaagagatccaatagaatgctgatcttttttt

SEQ ID NO: 2622 - DNA, 106 bp, synthetic construct
  source 1..106: mol_type = other DNA
gattaaagatgtttcatttttattgtagtgtgtggtattagcattttgattgtgatttaacatacaaaaccacacacaaaaaaaccacctaaaaaggcgggtaatg

SEQ ID NO: 2623 - DNA, 114 bp, synthetic construct
  source 1..114: mol_type = other DNA
gcctttacatataaaaaactcacttttacatgagtttacgtgttttttattggagcagatgaggtgggtgttttagaaatcacaataattcatgttagctaaagcaaagaccac

SEQ ID NO: 2624 - DNA, 102 bp, synthetic construct
  source 1..102: mol_type = other DNA
aagtgaaattcgatttttaaattctgcactcccctcttgacattaataatgagatattaatgacaaaaggggggtgcgaataaacgcacctccccttttaat

SEQ ID NO: 2625 - DNA, 102 bp, synthetic construct
  source 1..102: mol_type = other DNA
tgtctgctatcattaacacaatttacgttttctccttatctggtttcattcagagttaaaccagatagggataaaaatagatatgtatcggcaggagtacag

SEQ ID NO: 2626 - DNA, 108 bp, synthetic construct
  source 1..108: mol_type = other DNA
taagcggttctcatgattacccaattaggtgattcgtgaaattaatgtatcataatcttctgacgttgtgatacattaaaaaacgcgaccgtcgctaccgttgttgca

SEQ ID NO: 2627 - DNA, 103 bp, synthetic construct
  source 1..103: mol_type = other DNA
atcgtcacgccgccctctgcggcaaaatagttacttgtcactattagtccttggctttatagtgataaggaacaagatgaacttatcaaatgccggctgacgg

SEQ ID NO: 2628 - DNA, 103 bp, synthetic construct
  source 1..103: mol_type = other DNA
acggactcaccgattatatccagccctgttgtcaaattgaccacccaatcttgatattttggctaatttgacactcaactgtggtgccatccgtcgttgcgga

SEQ ID NO: 2629 - DNA, 102 bp, synthetic construct
  source 1..102: mol_type = other DNA
ccgaccgccgccgcgcatgatgccgcgatgtcgataacgcacaattcggttcggcacactacgcgttctgacaattgacggcttcagtaccgagccgttgaa

SEQ ID NO: 2630 - DNA, 111 bp, synthetic construct
  source 1..111: mol_type = other DNA
aaaaacgaggggcttaatcgttcgcccctcttaatttaagtaacactgagcactccacatgtgttgaatagacagtgagaacaaagtacgttgtgtccaaaggaagcggga

SEQ ID NO: 2631 - DNA, 115 bp, synthetic construct
  source 1..115: mol_type = other DNA
accggtgggggtcaattgcgtctggggaccgctaccgtcgtaattagcaccgcgccgaggcgagacacgaattaggacggtagtatccgcgcatgaccaaggcgatcatctacgc

SEQ ID NO: 2632 - DNA, 106 bp, synthetic construct
  source 1..106: mol_type = other DNA
atccacgcgggttacgcccggttttgcatttttcctattgcgtgctcgctatcttcctatgttggtgctatgatagagaaaaatcggcacacggaagacttccacg

SEQ ID NO: 2633 - DNA, 103 bp, synthetic construct
  source 1..103: mol_type = other DNA
cccacagtcggcacgctaccggtctgcaacgtattagtggtcagttctgctgccttgatttgtttgtaagacatgtcagccatggaaggtagacaccacagca

SEQ ID NO: 2634 - DNA, 103 bp, synthetic construct
  source 1..103: mol_type = other DNA
tgacatggcagacccccaatgtagacttctgccattatacaccaactattgccaacgtcgagatgtaatagaagagcaaaaaggaaagagttacccacgccta

SEQ ID NO: 2635 - DNA, 110 bp, synthetic construct
  source 1..110: mol_type = other DNA
ccgactaccgcacgtacgaggctggttgccatggttgcggagtgtatagtagtggtcgtacttatatctactccgaagtgcacaaatagacccaccattggagcctcaat

SEQ ID NO: 2636 - DNA, 102 bp, synthetic construct
  source 1..102: mol_type = other DNA
gcgacatcgctcccggctatatctacctatgtcctagctcgatcacttgagtaaaaggatcgattcaggtcatacttacgatatgactcgcgcagcgcttta

SEQ ID NO: 2637 - DNA, 102 bp, synthetic construct
  source 1..102: mol_type = other DNA
accccgtaaaatgcaataatttttttcttgttccttattgactttttccgaatggtagtctacaataaagacatagggagcgcgcaccctcacgaaaggagg

SEQ ID NO: 2638 - DNA, 110 bp, synthetic construct
  source 1..110: mol_type = other DNA
ggccaatgtgcaaatttcaagcgacggttattgtctgcataatggaacttgcatcaccttatttgttcttttatgatgacataggaaagtgacactcagtaatgatactg

SEQ ID NO: 2639 - DNA, 102 bp, synthetic construct
  source 1..102: mol_type = other DNA
acattacagagtggtattctataaatgagtaccactttgtactatatagactcctatcttagtcaatgtggtgttcattttgatatacacagttgtggataa

SEQ ID NO: 2640 - DNA, 106 bp, synthetic construct
  source 1..106: mol_type = other DNA
taccgcaagcggcagctcagggtcggacacgcggcgcttaataggccacgtcatcagcatgacgtggcctattgtcatggttgagcgcacgactttcgacgacctc

SEQ ID NO: 2641 - DNA, 150 bp, synthetic construct
  source 1..150: mol_type = other DNA
agcccgccgtctgtgtggatttaggaatgccaagcgcccaataagggtgttttttattttgcctcaaaggaggtgaaaacgatgtgagaacaggaggatttcaggacatgacacaaccgaatgattatgatgtcttacaaaaagaaatcg

SEQ ID NO: 2642 - DNA, 105 bp, synthetic construct
  source 1..105: mol_type = other DNA
gcccttgtccgtagccatcagcggggctgtatcttgggtcaatgcccgcgggcaccgtcattgatctaagatactacttatgtccgccacgcaaaccgccatcta

SEQ ID NO: 2643 - DNA, 102 bp, synthetic construct
  source 1..102: mol_type = other DNA
tgcgctggagtgctactcttccatcgtacgcccggtaaccaacatcaaccgtagacagggtcatatacggggcgaacacgagcagaaccctacattgaccag

SEQ ID NO: 2644 - DNA, 102 bp, synthetic construct
  source 1..102: mol_type = other DNA
tagttattcataatattatcctttctatgctaccacaaaaggatttaatcgggaacaaagccaaatgtggtaacatttaaattatttaaataaatcccttta

SEQ ID NO: 2645 - DNA, 108 bp, synthetic construct
  source 1..108: mol_type = other DNA
gggaggatgtcggtcattgtacgcgatttgtgctattaaagggagtgtcaatccagattatttggatgctaaatagctcgtaaaacgttcaatttttccattttttta

SEQ ID NO: 2646 - DNA, 105 bp, synthetic construct
  source 1..105: mol_type = other DNA
aagtgctcttgacccgcaaaaacggctacatgagtgtttgggtctgttagttctgaaactgacacacccaaacacatccatacaggcgtatcctcaaggccatga

SEQ ID NO: 2647 - DNA, 104 bp, synthetic construct
  source 1..104: mol_type = other DNA
caatgatcctttactataatttatatgtagtagagattatatacaagatggacgccaaaggcaaaatatctactacaaagacgcacaactacaaagatggctgt

SEQ ID NO: 2648 - DNA, 106 bp, synthetic construct
  source 1..106: mol_type = other DNA
gggaaatctctaaattaacgcttgcctgactgtacttacgtagtgatgggccagcccgcataaacgtaggtacggttattttgtctgttataacaaaaaaagccct

SEQ ID NO: 2649 - DNA, 102 bp, synthetic construct
  source 1..102: mol_type = other DNA
tcacgcctcaacaggaatccggactggagagtcatcatgacaacacgatcgaaagacgcatagtcgggaaacctctgaaggtgaggttccgttgataccacg

SEQ ID NO: 2650 - DNA, 105 bp, synthetic construct
  source 1..105: mol_type = other DNA
taaggataacacacatgtcatcatctgaactacgcggcaagccacgtatactggtcatcttacatacctaaacacgatatgtaaagaatcaaatacttggcttac

SEQ ID NO: 2651 - DNA, 110 bp, synthetic construct
  source 1..110: mol_type = other DNA
tccgggcgtgcatcgcccgatcgagagcctagatcggaaaggtcactaagcgcaagcgtgatgactcttgtcatccgactgggctctcgctctagtcgccacccgtcacc

SEQ ID NO: 2652 - DNA, 102 bp, synthetic construct
  source 1..102: mol_type = other DNA
atgacgttatgaaactaatttaaaagagggtttacgttctattctctacggatatacgaatataaacccactttttatagtgtaaaaaaaattactccaaga

SEQ ID NO: 2653 - DNA, 113 bp, synthetic construct
  source 1..113: mol_type = other DNA
gaatatatagagatatttagcgcaaacgagataaattgacttctgtgacagtgttcttcgtctatgtaacacttgtcaatgaacgatttgcgcggtttattaggaggaaatcg

SEQ ID NO: 2654 - DNA, 104 bp, synthetic construct
  source 1..104: mol_type = other DNA
atgaatgataagccctgcgcgcgccattgttgccttttctatggcggcgcaaatgcgccgccatcccaacggcaacttttccggtcccgcggcgttcaaagcgt

SEQ ID NO: 2655 - DNA, 106 bp, synthetic construct
  source 1..106: mol_type = other DNA
aaaaaccacttattaaattttcatttaataagtgggtgtaaaaactactcacttttgctgagtaattataaacccactatattttaaaatataatctattaatata

SEQ ID NO: 2656 - DNA, 109 bp, synthetic construct
  source 1..109: mol_type = other DNA
gaagaaagcccttcctttcgggagggcttttctttataactttctggctttcggcggtctaagttccagaaagttacaattttatagcttataaaaaatctccactatt

SEQ ID NO: 2657 - DNA, 114 bp, synthetic construct
  source 1..114: mol_type = other DNA
caacacccctaaagggttagttgtcttcttttaaaatgagttgcgagaccgattccacatgcgtggactgtacatggcaacacacgagatgttgataggctactcttcagtaaa

SEQ ID NO: 2658 - DNA, 102 bp, synthetic construct
  source 1..102: mol_type = other DNA
agaggggcttacaagggctgaaatgtaagggacattctggacgtaaatataccctttaccatacaatgtgaccccaagcattgtagataggccatatcaatg

SEQ ID NO: 2659 - DNA, 107 bp, synthetic construct
  source 1..107: mol_type = other DNA
taacgtttgtccagaaatttattgtctatatacacttcttatgttataaaattctattaaatcttatagcataagaatggtattctttcataaaaaaatactgactt

SEQ ID NO: 2660 - DNA, 107 bp, synthetic construct
  source 1..107: mol_type = other DNA
ttacagttaattgactatattaattaattgctaccttatttatacgtgcaaacatgtttgcacgtataaataaggtagcataattaaattacttctttgtatctttg

SEQ ID NO: 2661 - DNA, 102 bp, synthetic construct
  source 1..102: mol_type = other DNA
acaggcgagtaaggataccggaaccaattggcttttatagacgcttgactaccgtcaaggatcgttagatgctagggtcgatgttgccaaccatgaacgtcg

SEQ ID NO: 2662 - DNA, 102 bp, synthetic construct
  source 1..102: mol_type = other DNA
cggaatccggcggcaattcttgcgcgccgtttaattagccacaatgtcaacatattatgggcaattaattgacaacggttatctgtcgccccagatagcggc

SEQ ID NO: 2663 - DNA, 102 bp, synthetic construct
  source 1..102: mol_type = other DNA
ttcgttgatttatcaaggtttttgtgagtagttaatacaaaacgcctggttctcccggatttttgttctaactataaataacaaccgaatatccatagttaa

SEQ ID NO: 2664 - DNA, 102 bp, synthetic construct
  source 1..102: mol_type = other DNA
tcgcagggtcgctccgcgttgaacaaaatgctgtaatataatatttgcacaaaatggaaatttgtattacagcattcgttactaggaatggtaaacgtgttg

SEQ ID NO: 2665 - DNA, 103 bp, synthetic construct
  source 1..103: mol_type = other DNA
gacgtatgcgaacatggacggcactcttccttgaaaagagttacctttctgtcacgcataattacccttttcaagagcgaactgtcgaaaccgcaacgggctc

SEQ ID NO: 2666 - DNA, 110 bp, synthetic construct
  source 1..110: mol_type = other DNA
acttcggacatgctggatagcactctgattttttgggtctttagataataacatgctgatattgtgcgcaaaagacccttaatgatgcttagggccttcgaccttgtcct

SEQ ID NO: 2667 - DNA, 107 bp, synthetic construct
  source 1..107: mol_type = other DNA
gcaccaggaaaacatgcagtctctaaagcctagttaagcagatacagtaggcaagtaattgtttgactagtaaaaaggatctgatatgaatatcagatccttttaga

SEQ ID NO: 2668 - DNA, 102 bp, synthetic construct
  source 1..102: mol_type = other DNA
gctcttcggcccgctcggcgtctggttgcttgcgtgagcagaacattgcatccccaatgtatcattgagttaagcaaatcactactattatatagcattacg

SEQ ID NO: 2669 - DNA, 102 bp, synthetic construct
  source 1..102: mol_type = other DNA
gcccaggtcatagtgtctcgcagccaaactgtgtttaagcgatgctccctagggcaaaaatccctagagaacagtctctaggaggggcaccatgggattcgt

SEQ ID NO: 2670 - DNA, 111 bp, synthetic construct
  source 1..111: mol_type = other DNA
ccaatagtgtctggtatgtattactaaacaggtgtggactggatgtacaggattatctggacgaagagggatgtcttcattgtggcacctgtggaaaaaagaaaacagatg

SEQ ID NO: 2671 - DNA, 102 bp, synthetic construct
  source 1..102: mol_type = other DNA
tggcatcacggacatgccccaactcaggctttgactcctataacgcacttgtaatactgttataggagttacagcttattaagccctccgggcgcagtggga

SEQ ID NO: 2672 - DNA, 104 bp, synthetic construct
  source 1..104: mol_type = other DNA
tctctagtttttgtttcgtggtttcaatgtacctaaaatatataaaagagtttaaacgtatgtatataaattaggtacattaaaactttttatatatatttgca

SEQ ID NO: 2673 - DNA, 110 bp, synthetic construct
  source 1..110: mol_type = other DNA
acacccattgatattacttacttttcattaccgtgatactgtatcataacaataaaatatatggatacgtaatcacggttaatattatctttttattaaaatatatcctt

SEQ ID NO: 2674 - DNA, 102 bp, synthetic construct
  source 1..102: mol_type = other DNA
aatgcatatttattcgttttgagttatttttgtgtagtgacaactaaagctcgcattagttgtcatatgaggtaaaatagtcagcattccaactccctcaac

SEQ ID NO: 2675 - DNA, 105 bp, synthetic construct
  source 1..105: mol_type = other DNA
aacgccttgcaccggctatgccggcttaaaaatctagttgcagctcaactatggtaatggtagagttctaaatagataaaagaggcggggttatgaagtttaaca

SEQ ID NO: 2676 - DNA, 106 bp, synthetic construct
  source 1..106: mol_type = other DNA
cccgtgacgcgcacaccgtagaccgagttacgtcctaagtgtgtctatgcgatcggctgcatgcgattgagacatactcgtcgtcatgacccgagtcgcgatctac

SEQ ID NO: 2677 - DNA, 122 bp, synthetic construct
  source 1..122: mol_type = other DNA
cagggcttttgtatgttcgtaattaatgcttaataattcaaggataccgggttcatctgacaaccaaaggttacggtagcaaagaaaaggggacgtcccattttttcagactcttcctttac

SEQ ID NO: 2678 - DNA, 109 bp, synthetic construct
  source 1..109: mol_type = other DNA
tgatcgtggggtcgtttgcttctgcgttcatatgtcaattctaaggttttgacctctcaaaaccaagcttttgacatacattgccctgacttgtttctcgtgtcgagcc

SEQ ID NO: 2679 - DNA, 112 bp, synthetic construct
  source 1..112: mol_type = other DNA
acctatctttgtcaatatattcaataatatacaaacatctgacattgagtctacggccagccgtatcatcaatgtcagatgttgcagtgaacaccaacacagaacaccatgt

SEQ ID NO: 2680 - DNA, 104 bp, synthetic construct
  source 1..104: mol_type = other DNA
ataaataaaatgacaccatttggcctaaattatcctaatggtgtcattaagtgaacttggaaggattatcttcgaaccgtctgatacaagatttgaattggatt

SEQ ID NO: 2681 - DNA, 115 bp, synthetic construct
  source 1..115: mol_type = other DNA
aagccgtataaatcaagcaatgtaaggctttacaaaaaggttggaagttttttaaatccacacctgtgggcttaaaaaacttccacctacaaaataaaatcaataaaaagcagta

SEQ ID NO: 2682 - DNA, 112 bp, synthetic construct
  source 1..112: mol_type = other DNA
caaggggtgacagtatgtggttcgggtcatggcctcaaaattgacctttggacacggcgaacaagcaattttgacgccgaactgcatcgtagcgtgccgccagcgcgcatgc

SEQ ID NO: 2683 - DNA, 102 bp, synthetic construct
  source 1..102: mol_type = other DNA
actattttgataatgagcggtattaaaaatacttaatatggtacactatcctaacattgtagctaattaaactgcgcatcaagatcgatgctcataagggct

SEQ ID NO: 2684 - DNA, 101 bp, synthetic construct
  source 1..101: mol_type = other DNA
cgtcattgaagagcgtttaactaactggggtgataccagatacagtgagttgttaaagtatctgaaataaccccaacttgaatacgcagacggaagctcct

SEQ ID NO: 2685 - DNA, 120 bp, synthetic construct
  source 1..120: mol_type = other DNA
ctgacggagagttggatatagtttggcgcatttagtttgtgtttttaaaagcaataggatctccttttgcttttaaagacataacaaatagtacctacataataagcgggtgctaccatc

SEQ ID NO: 2686 - DNA, 106 bp, synthetic construct
  source 1..106: mol_type = other DNA
gtgcaaatataatatgttttcttgtcatgggcaagtacgttatgttaaacgaatataaattgtcgaaaatacccatgagaaaatagattcaagatttcaatatcct

SEQ ID NO: 2687 - DNA, 102 bp, synthetic construct
  source 1..102: mol_type = other DNA
tcatgggaggggcctttccgactgcaatgggtgattaagacagtcggtgacattacccgctggctgtataaccttcaatagcctacgatgattgtttgtggc

SEQ ID NO: 2688 - DNA, 113 bp, synthetic construct
  source 1..113: mol_type = other DNA
aaatgggcggatgatctacccaaaaaattacaggttaaatgtgtacaacttgatcaagtccggtctataatacctgtaagaaacgggcttacaggggcttgaaaatggcacgg

SEQ ID NO: 2689 - DNA, 106 bp, synthetic construct
  source 1..106: mol_type = other DNA
ctatggggtcgtttttgaccgggaaaattcctccttctgcttcacccgtccaagaacggttgatgcggaaggaaagaaatcccgcaaggccagcggtgacgcggct

SEQ ID NO: 2690 - DNA, 103 bp, synthetic construct
  source 1..103: mol_type = other DNA
actggtcgaaaatcactcaatccacgatggaacgtatcgcagaacacatccagatgtgttaggttaaaggttccacattcctgatctgttcaaaaaatgacca

SEQ ID NO: 2691 - DNA, 103 bp, synthetic construct
  source 1..103: mol_type = other DNA
aaacgcttatagctttgtaaaacacattggtaggtaattgacataactatagctgattatgttataatcctaccaaagccataaaaacggattttagcaatga

SEQ ID NO: 2692 - DNA, 102 bp, synthetic construct
  source 1..102: mol_type = other DNA
attaggagtagtactaaactattttaatgtcgtctatcatgtagttgactaaagacaactacatgttatactacattttataactcctaggaatgtgtaaga

SEQ ID NO: 2693 - DNA, 111 bp, synthetic construct
  source 1..111: mol_type = other DNA
tttattttgtttttaatagtttattcaggaaattaatggataaactattaaaggcaatgaataaccattactatattatccatataggtatgactcttgtaaaaccctgta

SEQ ID NO: 2694 - DNA, 112 bp, synthetic construct
  source 1..112: mol_type = other DNA
atagatatagtgtagtgctacaaaagtgtgtatgtcaaaatggcaccaaatcatcggtaccatcaaagggtgatttacttttgtagatcatccttttttactttttaaaatt

SEQ ID NO: 2695 - DNA, 110 bp, synthetic construct
  source 1..110: mol_type = other DNA
ttttataactagttgattagcagtgttattcttgactgtcatcattatcagcaggtttcaacaacctgctaattattacagttaaacaataaattcactatatttgctgc

SEQ ID NO: 2696 - DNA, 102 bp, synthetic construct
  source 1..102: mol_type = other DNA
attactatcgcacggcataaaaaacaagcaaagcggtgttcaatgagtataatacgcccgtattatgcacagcgagcaccggaaacacaataattcatacaa

SEQ ID NO: 2697 - DNA, 106 bp, synthetic construct
  source 1..106: mol_type = other DNA
caggccgctatcgcaaacgaaggcaaacactcgtaaattgcatgagtgtttggtggtgcatgcgttttcgatcgaaccagtctcatggctgaattccctgttctac

SEQ ID NO: 2698 - DNA, 113 bp, synthetic construct
  source 1..113: mol_type = other DNA
aaaacaaatacttaattttatttctttaaaacatacaattagtacatgtatcgacatgcatgtactaattgtgcgtttttgctacactttttttaacatactcgatgctatgc

SEQ ID NO: 2699 - DNA, 104 bp, synthetic construct
  source 1..104: mol_type = other DNA
gaaggtatagatatttttttcaacttttaaccctgttttaagacccagcattaaaatacttaacaataaaacaggggaattgataaaagcctctgaaaaatcag

SEQ ID NO: 2700 - DNA, 114 bp, synthetic construct
  source 1..114: mol_type = other DNA
ggcagtgcatgagtcatgcccagagtgtatgagctaagtcgggcctgagggaggtcgcccccgggctaactcttgcagtcgaggggcatcgccgagccaccgctctgccccctg

SEQ ID NO: 2701 - DNA, 104 bp, synthetic construct
  source 1..104: mol_type = other DNA
gtatttgaaacaaaggtatatatttttgatgagtatgcaaaccttttaatgatgtttaatacttgcacactcatacttctcaaacacgctatcaattaattatt

SEQ ID NO: 2702 - DNA, 102 bp, synthetic construct
  source 1..102: mol_type = other DNA
ttacaaaaaagacgaagaaatttcttaaatacccttgacaaaagctatcagaggttatattctatgaagtgtagattagaaaaataaaaagggggaaaagtc

SEQ ID NO: 2703 - DNA, 115 bp, synthetic construct
  source 1..115: mol_type = other DNA
tacacgcacaggcttcatgagtcgtgaccctataacagcagtacgcaagtgacctgccgtacatgttttgctgggtgccgctggtgctggcgggggcgtcggtgatgtcggtgga

SEQ ID NO: 2704 - DNA, 110 bp, synthetic construct
  source 1..110: mol_type = other DNA
gtatagatcccggccaaacgtctccccgtttccatgctttgatgataccctcagatgtgtgagcctgcgaacaaagcaggaaactaaccgaagggaatgggccaatgacc

SEQ ID NO: 2705 - DNA, 100 bp, synthetic construct
  source 1..100: mol_type = other DNA
tactgtcaaatctaccgcttggggtgtaccatccttacggaatacacccccgcctgaaggcgtccactccataaggagggtggatgccttcagtttttta

SEQ ID NO: 2706 - DNA, 115 bp, synthetic construct
  source 1..115: mol_type = other DNA
tttcaaattctaaatatgggattgtgttcttaaaataggaacacccaaaactactccaccgtgactgattgtttttgggtgttcctatttcttttttggtttttttttacgacca

SEQ ID NO: 2707 - DNA, 109 bp, synthetic construct
  source 1..109: mol_type = other DNA
cataacggttagaatttacacatggtcatactatacggcatttctgcaagaaactgcgagcacttttttacacaagtgccgtaaatggtattgatgagaataagctctc

SEQ ID NO: 2708 - DNA, 108 bp, synthetic construct
  source 1..108: mol_type = other DNA
tagtgcatacaataaattaattcttacagataacgaaaccatcaattagttgataaattttaccaagacaattaaaagttttgctcaagctttttcaaaagcttgcag

SEQ ID NO: 2709 - DNA, 103 bp, synthetic construct
  source 1..103: mol_type = other DNA
aacaacagtttaaatgtgtttaagttattcattgttagtgtgcatttatctgactatgtgctaagattatatgaataacttttatagatacttacttatgccc

SEQ ID NO: 2710 - DNA, 108 bp, synthetic construct
  source 1..108: mol_type = other DNA
gaagctgctccgcagcgctcagcaggtcgtcgtatacgtcgcgtacgttagggcgcaccatagtgctccgacttatacgagtcgaggcacaagaagattgattttccg

SEQ ID NO: 2711 - DNA, 110 bp, synthetic construct
  source 1..110: mol_type = other DNA
cgtcatgcggggacgttctgtttttgacagaaaagtttctctgtgcggaacgcttccccgttccgtacagggaaactacagccgccagtatattgtgatctgctccggat

SEQ ID NO: 2712 - DNA, 109 bp, synthetic construct
  source 1..109: mol_type = other DNA
gtacgggggctctcttgttgctggtagaattggttcccttagtccaagggtgtccctgggctaagattgccaactaacggaaggggggccggatggacaccgagccgcg

SEQ ID NO: 2713 - DNA, 104 bp, synthetic construct
  source 1..104: mol_type = other DNA
accggtagtgcccctgggggttcagtttatttccctataagatggagccgtccgtgtccggtgcatagggacaatttatgaacctacccacataacttaatatt

SEQ ID NO: 2714 - DNA, 104 bp, synthetic construct
  source 1..104: mol_type = other DNA
agcgcgagctcttcggcctcggctcctaatccgctttatttcctcaacagtggcgactgttgacgtattagggcagacttagcgcatgactccgaagaagcccg

SEQ ID NO: 2715 - DNA, 102 bp, synthetic construct
  source 1..102: mol_type = other DNA
gcacggcgcgcgatggcctagcgcgcggttgtgctttgaagtaattgatagttgttcattagtccaaagcacaaacgcccccacctgcagcgatgcgggcgg

SEQ ID NO: 2716 - DNA, 107 bp, synthetic construct
  source 1..107: mol_type = other DNA
cggctttcatagatttacctcctattaactgtggtgcacatcctatcataactgttcgtagtcatgcaagaatgtacaccgcagtaaaacaagaaaaaaattaaata

SEQ ID NO: 2717 - DNA, 102 bp, synthetic construct
  source 1..102: mol_type = other DNA
tatcaggccccaactgcggccacgacttcactgcatttcattccatatatggggaaactgtcgtaactacaccgtaaagtccggtctcatgcgagccatcct

SEQ ID NO: 2718 - DNA, 111 bp, synthetic construct
  source 1..111: mol_type = other DNA
aatgattcatgattcattctatcatggtgttttacaaggagtattataatatgattgacctatcaattacaactttttcctcccgagtgcgaactcaataaaaaggagcca

SEQ ID NO: 2719 - DNA, 112 bp, synthetic construct
  source 1..112: mol_type = other DNA
ggagaaatattgcatcatcttatcattatttaattagcttcatcttctacgagcgagttctttcgctcgtagaagatgcaacgaatgaaaaacgccgctatttcggcacttt

SEQ ID NO: 2720 - DNA, 114 bp, synthetic construct
  source 1..114: mol_type = other DNA
taaggcgcgagaaattatcattgtttccgcaaaatgataatatgtcttatgtcggcggaggcacacctccatcgactaaaaacattccttgcgtctaccggaaaacacaaaaaa

SEQ ID NO: 2721 - DNA, 102 bp, synthetic construct
  source 1..102: mol_type = other DNA
agttattgagattgattgaaatatatttttgtcaaaatgaaactgttctccgagtaatagtatcattttacaaaaaaaacaaccttgttataatcaaccact

SEQ ID NO: 2722 - DNA, 102 bp, synthetic construct
  source 1..102: mol_type = other DNA
ccgccggggcattttttgtgtacgaggaaagtcttatctaaatttccgtacctgtcaactttcaattggactattcctatgcgagcaggaatctatgcgcgg

SEQ ID NO: 2723 - DNA, 110 bp, synthetic construct
  source 1..110: mol_type = other DNA
agtcatcacgacttaagctagcgagttgcaacaaggtatacaacatgaacatgttatttcgttgacttcttcatattgtatactttttaaaccctataaaaaaatttgtt

SEQ ID NO: 2724 - DNA, 149 bp, synthetic construct
  source 1..149: mol_type = other DNA
gataattgagtggcacttgatttccaaggaaatcttcgtcccagattgttttcgtaagcgaacacgttcgcaacgactccaagtaattaacgttttgaggactgtggaggtttactggattttttaagacctggttgtatactttataa

SEQ ID NO: 2725 - DNA, 108 bp, synthetic construct
  source 1..108: mol_type = other DNA
ctacagacaatctggaaaactgttgttacggcactacctacaagattgtctcgcagttctttaggggagtgccgtaaacaacagtcgtcatgtgattcctctaatcag

SEQ ID NO: 2726 - DNA, 110 bp, synthetic construct
  source 1..110: mol_type = other DNA
gtaaaatacgtaaaaaataacagagattttcatactactaaattgaacctaccgactggaggggttcagttagtagtataacaatcacaaaaaaataatatgaatgtttt

SEQ ID NO: 2727 - DNA, 117 bp, synthetic construct
  source 1..117: mol_type = other DNA
atcctgacgaccgcggaaaggccaaccccggccgtctactaattgtagcgttcgagggctggaacgatacacttcggcagacaagctcgccactgcgtatccgctggtaaggggccc

SEQ ID NO: 2728 - DNA, 106 bp, synthetic construct
  source 1..106: mol_type = other DNA
gggaagcctgtttcgacaaacaagcgcttagggtggctaatattttagtggatcacactccataaatcaatttgccaccccactttttcggaactttcagacatac

SEQ ID NO: 2729 - DNA, 107 bp, synthetic construct
  source 1..107: mol_type = other DNA
gttaaaggcgtaccaatcgccaaatccttgtgtcgtatcttagagagttgaaatgaagattgcaagaactaaaaaacatttctctaggacagtacaaaacggatttt

SEQ ID NO: 2730 - DNA, 106 bp, synthetic construct
  source 1..106: mol_type = other DNA
gcgggcttttctcgtcgctctcgcgatgtcgaagatattgaaggactgtgtggtggtgcacgcagtgattacccaaccagtctcgcggcggaaatgggataaataa

SEQ ID NO: 2731 - DNA, 102 bp, synthetic construct
  source 1..102: mol_type = other DNA
gcccttggtggcccgctcgccgctcgtgggtgcactggccgtccgtggcgtccgccacggacggccagtgcacccccggaccaatcacctttttgcaggtga

SEQ ID NO: 2732 - DNA, 104 bp, synthetic construct
  source 1..104: mol_type = other DNA
ccttgcaaatcctgacctttttcgccgggtgtcctaatggtgctgtgccgtgggtattgttcctttaggacacctactttcttttgaaaagaaagtaggcaaag

SEQ ID NO: 2733 - DNA, 117 bp, synthetic construct
  source 1..117: mol_type = other DNA
taaagcacagaagaaactgttccattttatgtttagtggctattagctaaatgcggtggttttgctaactacacccaagtttcaggcagatatgacagggatgttaaaacagatttt

SEQ ID NO: 2734 - DNA, 116 bp, synthetic construct
  source 1..116: mol_type = other DNA
gaagtgccgcaaagcgttgattttacggcacttctcataaaaggtaaacttcccatcttccgcatttgttaggtattaaacgtgtatatcaaaaagcctcgaaatccagtaaaatc

SEQ ID NO: 2735 - DNA, 111 bp, synthetic construct
  source 1..111: mol_type = other DNA
ttaaaggttaagcgaaagttgaagttttatttttttactggtatttatgatggtctggatgtgcaacccagtttaaataccgtcaaattataaattaggttgtatagtaaa

SEQ ID NO: 2736 - DNA, 107 bp, synthetic construct
  source 1..107: mol_type = other DNA
ctcttttttgaaaatatacattgtataaattggtattttgataatgatttacttatatattgtaactattaagctatgatggtaaaatacttgatataataacaatt

SEQ ID NO: 2737 - DNA, 106 bp, synthetic construct
  source 1..106: mol_type = other DNA
ctgtttataagggtttacggatatgttataggttactgcaatacgggccgccaaataacaataacctataatatttctacatattataaatatacacgaaaatgat

SEQ ID NO: 2738 - DNA, 115 bp, synthetic construct
  source 1..115: mol_type = other DNA
gtgagtaattatctaactcattgaatttatagttacttattttaggagatattatgtcgatgagttgataaaatagaagtaactattaactcaccatgaaatataccaaatgata

SEQ ID NO: 2739 - DNA, 111 bp, synthetic construct
  source 1..111: mol_type = other DNA
caatgatgggattcacattattttttaatgtcattctatattttattcgtatcggtgttcctgtcaggataaaatatagaacaatattcccttgacactccgaacatatat

SEQ ID NO: 2740 - DNA, 108 bp, synthetic construct
  source 1..108: mol_type = other DNA
ggtttttttaatgcaatttaataaaaaaatccgtaaacatgttattagtatcaactgattcacataacatattacggtagtagaaatgccgtaaactactataataaa

SEQ ID NO: 2741 - DNA, 109 bp, synthetic construct
  source 1..109: mol_type = other DNA
gaacgggcaggctggcggtttgtcgcgttgcggcccggactattcggcagaggcagctctggtcaggagtccgggtaggacataaaattaatcatgagcagcggaaata

SEQ ID NO: 2742 - DNA, 100 bp, synthetic construct
  source 1..100: mol_type = other DNA
gccagacttgccgccccggcgacctctccctgaccgccccctcacacagcaattttgatgtggttgtaagggtcggctttgccgaccgtctggccggtca

SEQ ID NO: 2743 - DNA, 104 bp, synthetic construct
  source 1..104: mol_type = other DNA
aatttggttgtcggagattgcaatttatggcacaattcttttttcttgggtgaaaaaacgagaaaagacttgtgccattcagaaattattattacctttgcagc

SEQ ID NO: 2744 - DNA, 105 bp, synthetic construct
  source 1..105: mol_type = other DNA
agaatatcagtggctgccatctgaattgtttccgctgctcacccatcgcattcccgatggtatagtagtggaaacaaatggggcagttctaaccaaaagcagcag

SEQ ID NO: 2745 - DNA, 110 bp, synthetic construct
  source 1..110: mol_type = other DNA
accttgtactgcttccccataccggcaggctaacacgggttatgcctgataccgcacgcaaaacccgacaaatcccggggtaacgatcctcacgagctcaacctagacga

SEQ ID NO: 2746 - DNA, 102 bp, synthetic construct
  source 1..102: mol_type = other DNA
atcatgttccggcctctcaggactctggtttactatgagccagatccgcgcacgcgaacctggtggaaggtatattaacactgtggcgaggctactaggtag

SEQ ID NO: 2747 - DNA, 109 bp, synthetic construct
  source 1..109: mol_type = other DNA
gcatgttgctaaaacttagtagaataggcataaaatgaaggtgttgtacagaacctaacaagttttatctttaagataaacaatgagatatcagaaaaagcgagctttc

SEQ ID NO: 2748 - DNA, 108 bp, synthetic construct
  source 1..108: mol_type = other DNA
agcaggcgccgcagtttggccggcagttcatgtgtccctatagttgacaaccggcttggcggtcggtaacttaagggctacttgagcaaacttcatgtaccgattatg

SEQ ID NO: 2749 - DNA, 102 bp, synthetic construct
  source 1..102: mol_type = other DNA
ttgacctctaagcctaccgccaacaaaatatgtacactgaccgctaaggtgtgccttgacggtcagtgtacataagctgtatccccttcccggtaacccagc

SEQ ID NO: 2750 - DNA, 115 bp, synthetic construct
  source 1..115: mol_type = other DNA
cgattgaccgtctccggcacggcttaccccttgcttgtagacgttgatccgaaacggaactccaccacatacaaatacgaaacaacgtcaggatgaaagctcgatggacctatgc

SEQ ID NO: 2751 - DNA, 100 bp, synthetic construct
  source 1..100: mol_type = other DNA
gtatagcgctgcctcgcttttcgtgattgttgtatatgctgtgctcagggcaccaagcttttggtaccagtcttcctcaagatactgggaacagaagatc

SEQ ID NO: 2752 - DNA, 104 bp, synthetic construct
  source 1..104: mol_type = other DNA
gatggcaccttggtcccggtgtggcgtatccatgtcttttgagacgttcggcccactgacggtctcaaaaggcttggctaatgctaagctcgcggagcgagccg

SEQ ID NO: 2753 - DNA, 109 bp, synthetic construct
  source 1..109: mol_type = other DNA
aacccggaacgaattatcaatgattctataggggttcatagtacggaaagttggcacgctgtactttctatactatgaactcaacggatgcatatcctactaccaaaaa

SEQ ID NO: 2754 - DNA, 103 bp, synthetic construct
  source 1..103: mol_type = other DNA
aaaaccgcagattgctgcgggctttatgctgttgactcctgcaacgcactggtaatagtgttataggagttacaatgcgttaagcctcatagggcaaaagagg

SEQ ID NO: 2755 - DNA, 104 bp, synthetic construct
  source 1..104: mol_type = other DNA
tattagccataacaccagcgtaccgggcgtgttcacggtaggccagttctcaccatcaatggccacccgtgaacacggctctactactggctatgggcgtcagt

SEQ ID NO: 2756 - DNA, 104 bp, synthetic construct
  source 1..104: mol_type = other DNA
tttctaacaaccggcggtatgtgctttttactgtcttttattgactaacatcttgctattgagatatgatatacactattgaaaatgctcaatcggggtgaata

SEQ ID NO: 2757 - DNA, 111 bp, synthetic construct
  source 1..111: mol_type = other DNA
ggatgtttcttttgttcccgtgtgatttattgggttcctatttcttttacagccaggtgtagttaatataggtgcaccaaaaaattatgatattctcttaacatgaaaaag

SEQ ID NO: 2758 - DNA, 103 bp, synthetic construct
  source 1..103: mol_type = other DNA
atgctggcaatgctaccatcaaaaatggttgctgaattgccaacaatcatagcccactagggacaatttagcaaccaaactgacttgtaggtaactcattgat

SEQ ID NO: 2759 - DNA, 113 bp, synthetic construct
  source 1..113: mol_type = other DNA
aaatgttcatgcttcattttatcatgatgttttacaaggagtattataatatgattgacctgtcaattgcaaccttttcctcccgaatatgaactccacaaaaaggagccttg

SEQ ID NO: 2760 - DNA, 106 bp, synthetic construct
  source 1..106: mol_type = other DNA
tatattgatatctcaataacatacgagttcgcatctttgttctgaatggcgcaccattcctgaacagatttacgaaccgtgggcgtgggttgaccgttcgggccga

SEQ ID NO: 2761 - DNA, 105 bp, synthetic construct
  source 1..105: mol_type = other DNA
tttccgcatctgagcacttgatagtcaaggaacatcatcgacgacttaaaccgtacaattatcattcatattccgcatcgggcataccgagaggactaaattcat

SEQ ID NO: 2762 - DNA, 102 bp, synthetic construct
  source 1..102: mol_type = other DNA
accttaattttttcagtactatatatgaaagttacttttaacgctatacagagcgataatttataatgtaacttcttgacgctctatacaatgttctcttct

SEQ ID NO: 2763 - DNA, 111 bp, synthetic construct
  source 1..111: mol_type = other DNA
tattaatgcaacaaatataagttgtttttcataaatgtacaatagtaattgaaagaaaaaactcaattactattgtacatttataaaacatcactaataatcaactagtta

SEQ ID NO: 2764 - DNA, 102 bp, synthetic construct
  source 1..102: mol_type = other DNA
acacccttcttctaactgggttatagtctgttgtctaccgtgcgtattagcttatgagctaatacgcacgttagacaacagcccataacgcttttagaagaa

SEQ ID NO: 2765 - DNA, 108 bp, synthetic construct
  source 1..108: mol_type = other DNA
gccatgtgccatcctgggcatcccgaccgtggggcgtgtgcgatccttcgactcgtcgcatattcacagacgccccacaatgtgagatactgaaggcaggatatggga

SEQ ID NO: 2766 - DNA, 105 bp, synthetic construct
  source 1..105: mol_type = other DNA
cagtttcggggtcacccagctaacttaacacccccaacacgatatctgcttgctcaggcgtcgttttgggggtgtgaatgtgaacctcctggtcaggggtgcttt

SEQ ID NO: 2767 - DNA, 111 bp, synthetic construct
  source 1..111: mol_type = other DNA
gattcgtgcaggtagatccagcacgatcatgatctacatgtggtaattatgtgtccgagggctgatcgataccgcggccccaccgtcggcgcccgcggagattgatgtgat

SEQ ID NO: 2768 - DNA, 114 bp, synthetic construct
  source 1..114: mol_type = other DNA
aaataataaaaatgccttcaatcacagagggagagccacatataacatcgaggcacggaagaaccggcgccacaatgataactgtggctctgctgctgggattgaaggcctttt

SEQ ID NO: 2769 - DNA, 102 bp, synthetic construct
  source 1..102: mol_type = other DNA
acccctcatagggacatacttagttttatagctctactgtcaaggtgatgctactgtatttgatactaagcccacaaacttttagacaaatcctgcttccaa

SEQ ID NO: 2770 - DNA, 102 bp, synthetic construct
  source 1..102: mol_type = other DNA
aaataggagcatggataatacaatcaaaccatacttaagcaaaccactatatgaaataatttgccaaagtatggtttaagtgcgtttttctatacggtagtg

SEQ ID NO: 2771 - DNA, 102 bp, synthetic construct
  source 1..102: mol_type = other DNA
acaaatctatacttcatagtatcatagagttgtttatcatacagttgtctttagaaaagtaaataataaaccactctttttacagagagtggtttattaagt

SEQ ID NO: 2772 - DNA, 105 bp, synthetic construct
  source 1..105: mol_type = other DNA
aatcacgatctattggtctcaattctccattcgtgattgtatggttattgttgaataagttaacaatcgcgaatttatgaaaattgcctatgcccgtgtctcaag

SEQ ID NO: 2773 - DNA, 115 bp, synthetic construct
  source 1..115: mol_type = other DNA
aatcagacactcttgaaaatactaaagatttcagaatcagcgtagcgccgatgatggattggacacttaaaacaactttagtaaattaaatcaaaaacttaactaaataatattt

SEQ ID NO: 2774 - DNA, 102 bp, synthetic construct
  source 1..102: mol_type = other DNA
ctcgcccgtctgcctgtcccgtctcgctacttccttatgggacacagacaaaagccggggccccataaggaagtaatatcgtcttagtgaaacggcatagtc

SEQ ID NO: 2775 - DNA, 105 bp, synthetic construct
  source 1..105: mol_type = other DNA
cgcaaagaaatgaggaaaacttttctctatgtccttgacaaacagaccgaaaagggttaatctgttaaggacagaggaaataaagccacagaaagtgaggtgcag

SEQ ID NO: 2776 - DNA, 103 bp, synthetic construct
  source 1..103: mol_type = other DNA
atgatcgtcatgcttcacggtagcgatgggtagtatgcaacacaagttgttgaaagcatgttgcacgctagacattgaaatgatagcgcttttctatgaagat

SEQ ID NO: 2777 - DNA, 102 bp, synthetic construct
  source 1..102: mol_type = other DNA
aatatctgataatcagtttgtacgaatggttaaagtgtttattctgttgttcaatataaagaaatcacttgcatagttctgtgacttttggtaatttcgctt

SEQ ID NO: 2778 - DNA, 106 bp, synthetic construct
  source 1..106: mol_type = other DNA
gaaaatgcaactagcatgccattctccaatgtccttcttctgctaacgtgccctcgtgagtgagttttgggtattggcgcgagcagcacgcccgcactggccctct

SEQ ID NO: 2779 - DNA, 106 bp, synthetic construct
  source 1..106: mol_type = other DNA
ttgtaacggtagagtactgatttctaatgatttgttttattgcccaatatcggcatattgcgttatactatacacaaatgatgtatagagaggatgaatcattatg

SEQ ID NO: 2780 - DNA, 108 bp, synthetic construct
  source 1..108: mol_type = other DNA
ccttaaccatgagttactccaagtactatgtttgtattaatagtactatgtatacccaaatcaaaacacaattacaaacattttttttatccataaatcccccatcaa

SEQ ID NO: 2781 - DNA, 105 bp, synthetic construct
  source 1..105: mol_type = other DNA
aatcctgctagtctttttttgtctctatacatcatataaaaaacttagtacctacttcatttgttatatgacgtatgatataatcccaatatcaaaacaagattc

SEQ ID NO: 2782 - DNA, 102 bp, synthetic construct
  source 1..102: mol_type = other DNA
acggtcaaattctgacctgttgctagttggctctttcaacgacatcacacgggtgtgtagttgctgaaagataccatgccaacaaagcggtgctaaaccccg

SEQ ID NO: 2783 - DNA, 117 bp, synthetic construct
  source 1..117: mol_type = other DNA
tggcccgtatgactgacgcccccgaccagccgcccgtaagatgtgtaagagtcctcctcgccgaggaggagtaaccccttgcggacctagggtctgacctgcgcctttctgatgtgg

SEQ ID NO: 2784 - DNA, 111 bp, synthetic construct
  source 1..111: mol_type = other DNA
cggggtcataagatgaattaaaaataagaagattggttgttattaaatcttgccattggtggcagaatctaaatgcaactatataatacaaaagaaaaaccctgaaacaac

SEQ ID NO: 2785 - DNA, 107 bp, synthetic construct
  source 1..107: mol_type = other DNA
cttcggggctcttttttatgtttaaagtatgtacctatgcacccaatggcttaccaaagggtacacaggtacaaattacgcgaaagctattcctttaattccccatt

SEQ ID NO: 2786 - DNA, 104 bp, synthetic construct
  source 1..104: mol_type = other DNA
aaacacagcttccggcgcgccttttatgtatgggtctaaaataacatcttcgggggaagacggttttttaggaccattagggtcccctgctcatgcggtttgcc

SEQ ID NO: 2787 - DNA, 105 bp, synthetic construct
  source 1..105: mol_type = other DNA
attttttgatttaattactgataaaaaatagcatccatcattgatgtacgtacacgtactaccatcaatgatgaatgtcaatggcgcgaaaaatccacaaccggg

SEQ ID NO: 2788 - DNA, 108 bp, synthetic construct
  source 1..108: mol_type = other DNA
tttttaaacggaccttgagagctaaaggaatctctaaaatgaacgggttacgtggctgtgcgcgcagtcccaagcgaacccgtctccacgggcaattccctgctaact

SEQ ID NO: 2789 - DNA, 108 bp, synthetic construct
  source 1..108: mol_type = other DNA
ggtaggccgccaatctgtcggcagctgcccgctgtcaccagttgaccagagccctgcccgtcatcacctaatttataacagggtcggctccactctgtatgtcgcgta

SEQ ID NO: 2790 - DNA, 105 bp, synthetic construct
  source 1..105: mol_type = other DNA
ggcaaaaaatgagtattacgatatcagttcgtatccgtatgcctgcacagttaaataaccttgcgtacatacggatataatttgatatcgcaatatttgacgttt

SEQ ID NO: 2791 - DNA, 112 bp, synthetic construct
  source 1..112: mol_type = other DNA
tccaattgccatatttagagaatgaaaattctcatttagatatattatggtgaaccttatcacaagtaaatgaggtttcattaaaaaacgcctaattataggcgttttttaa

SEQ ID NO: 2792 - DNA, 104 bp, synthetic construct
  source 1..104: mol_type = other DNA
gcgctagtgggcgcttctgtctacagatacgtctctggtctcgcatagtggccactatgtacgaacgaagacatactcgggtattctgttgctatgccagccga

SEQ ID NO: 2793 - DNA, 102 bp, synthetic construct
  source 1..102: mol_type = other DNA
cattaagaaatgtttcaattacagtgatagtagtctattgacataagtttatcaacctatgtcaataaactactaatgacatattttcacacagtgtcgtaa

SEQ ID NO: 2794 - DNA, 106 bp, synthetic construct
  source 1..106: mol_type = other DNA
gtttagacgtccccggaaattagttaaaacgtgttgactctgtatattccacacatgtggagtgcgtagtgtcaacatatagaaaagatcttcttataggtgaagg

SEQ ID NO: 2795 - DNA, 111 bp, synthetic construct
  source 1..111: mol_type = other DNA
tctcaatcacatttaccagaccttttgcgctatcgggtgcagacaagattgcattaggcccgcctaatgtcttatagtttgaacttgtgttattgttaattaatcgttcga

SEQ ID NO: 2796 - DNA, 107 bp, synthetic construct
  source 1..107: mol_type = other DNA
ggttcattgaacaggagaacaatgatatgagtgttaaggcaagaatactagtgcttttacatagctaaacacgtacattcatctacctgtaaaaacaggacataaac

SEQ ID NO: 2797 - DNA, 102 bp, synthetic construct
  source 1..102: mol_type = other DNA
gaggggttattagcccctctcttttttatgtatggtttgtaacaatatccacctacaaagtgctaaaccatacatgttaaaaatgcaaatctatattgttta

SEQ ID NO: 2798 - DNA, 111 bp, synthetic construct
  source 1..111: mol_type = other DNA
ccagctcacggcgggttttcgtcgtttagacagtggaatgtcgaccttttacgggttctacaggccgacagaaccgtctaaaatgtaacgcatgcgcgcctcgatttacac

SEQ ID NO: 2799 - DNA, 113 bp, synthetic construct
  source 1..113: mol_type = other DNA
ccctctaagctctatacttagaggatatcacaggtctcttatggaaacaaggcatggctactaagtttttaaaagagaccaaaaagaagccgtcactcctaaggagcttcagc

SEQ ID NO: 2800 - DNA, 112 bp, synthetic construct
  source 1..112: mol_type = other DNA
attagtatctgcttctttttataatatttatataaaatagtgtttttgtaaagtacacatcaccatatttgacaaaaaacctataaataattcttttgattgactgacaatt

SEQ ID NO: 2801 - DNA, 107 bp, synthetic construct
  source 1..107: mol_type = other DNA
cggcttcagaaggttaggcaacagaactcaaagtctatttgagacgacgctcgggcaccctaatgaaacaaaccctatacttctacgatccgacacgacttgacctg

SEQ ID NO: 2802 - DNA, 103 bp, synthetic construct
  source 1..103: mol_type = other DNA
acaaatgcttaaaaatgccgaaagagacacttccttatgtgaagtgtcccttcgtccccttcacataaggaagtggaggggacgagggcagctctgacaaatt

SEQ ID NO: 2803 - DNA, 104 bp, synthetic construct
  source 1..104: mol_type = other DNA
taaaatttgataaatacaatagtatattagttatattttaatacatatatcttcagataaatgtattaaagttcctatttacctgaagctatagtattgcttgg

SEQ ID NO: 2804 - DNA, 102 bp, synthetic construct
  source 1..102: mol_type = other DNA
gttgattatatttgattaatcactaagcagcatttattatacatttaaacatattaatgcgtttaataagtgctgcctaatagtgaatccatttttgattat

SEQ ID NO: 2805 - DNA, 104 bp, synthetic construct
  source 1..104: mol_type = other DNA
atcgcggctcggatcggcttagtcatggtacccagtatagtggactgagatgcatcggatcacggtagtgggtacgaaagggagaaccccgtgaacctgctggt

SEQ ID NO: 2806 - DNA, 105 bp, synthetic construct
  source 1..105: mol_type = other DNA
cccaatcggctaattcacttgtgatttcaaatcatccttatgagaattagcctttaggctatttccgataaggatgttttgccttgtgtgttttggctgtgcagg

SEQ ID NO: 2807 - DNA, 103 bp, synthetic construct
  source 1..103: mol_type = other DNA
tatataaagttcaaaaataccaatctaccacctaatagttaattaatgttgtaacataaatatacgatttggtggtgaatatttttttttctatatttgtatc

SEQ ID NO: 2808 - DNA, 107 bp, synthetic construct
  source 1..107: mol_type = other DNA
gtcatccgtagaaccttccataagttggtgttctaatcaataccatgatctggataggtgaggcaataaggataccattgcctcaattcaccacttgctgatatcac

SEQ ID NO: 2809 - DNA, 103 bp, synthetic construct
  source 1..103: mol_type = other DNA
aggctgatgagttacgagaaaattttataaatctttttggaatagaacgcttacatgctgatttttcatctttcctgccaatatactgtccggcaacaactgc

SEQ ID NO: 2810 - DNA, 105 bp, synthetic construct
  source 1..105: mol_type = other DNA
ttttacttccatttttgaaccataaaacgtgccatcccggaactatagcccaggacatgcgccgggggaagcacgtttttacgctgaaaataaagtgcttgacga

SEQ ID NO: 2811 - DNA, 102 bp, synthetic construct
  source 1..102: mol_type = other DNA
tagcaccgcttttttatttgttcaaaaagttgtattaagttactaaacaaacaagttgtgtaaccaaatacaactgagatataatgacactgtagacataga

SEQ ID NO: 2812 - DNA, 108 bp, synthetic construct
  source 1..108: mol_type = other DNA
aaaaggctccaacgagggagccagtttacatacatgtttagatagttactatgaccaatacgcatatctaaacattattttttgatgaaccactattaagcagcgtca

SEQ ID NO: 2813 - DNA, 102 bp, synthetic construct
  source 1..102: mol_type = other DNA
atcaacgtagtctctttatgataatagtaggagtatttacataacattaccccgaaccagcacccatttcaataattggataagcagaaggatcgtcaccat

SEQ ID NO: 2814 - DNA, 104 bp, synthetic construct
  source 1..104: mol_type = other DNA
atcagcatactcactctatagaaccgactgtatgtctattataggtcaatcctctggttgtgtcaagatagacatacagttttttcggaattttttcagctgcc

SEQ ID NO: 2815 - DNA, 105 bp, synthetic construct
  source 1..105: mol_type = other DNA
agaaacggcgatattactacatttatcttttagttaattatgggtcacttatactttaaggtgtttcataattaactaaacaaatttactaacccaaatactctg

SEQ ID NO: 2816 - DNA, 111 bp, synthetic construct
  source 1..111: mol_type = other DNA
aaaaagaatgtcgagtgttcataactcaaatccgttatgaacactcgacatggtcggagtgtttataacggatttgacgaacatacaatggcgacgggcacatattccatt

SEQ ID NO: 2817 - DNA, 118 bp, synthetic construct
  source 1..118: mol_type = other DNA
tgggcgagtacgcccagagtcatgaagcccacgacggggttggactctgacacgaagtgcaagaagaacgttccagagtcaaactgcctgtactctcgcggccatgagcgctaccaac

SEQ ID NO: 2818 - DNA, 105 bp, synthetic construct
  source 1..105: mol_type = other DNA
gtggggttacaccgtatccctgccaaaaacatccttatggggctttggctaatgccacagcccggtaaggcgataatttcaaaacactgaaaaatggcatttgca

SEQ ID NO: 2819 - DNA, 106 bp, synthetic construct
  source 1..106: mol_type = other DNA
gttttctttgtccattatacgagtgtaatcgataaattaattagccacaacatgtcgatatatgggctaattaaattaagcttacactacgggctaagcggaggaa

SEQ ID NO: 2820 - DNA, 108 bp, synthetic construct
  source 1..108: mol_type = other DNA
tcgccgattccgttgcacccacagaaccagtgtgtcatagttcaatccatgtcttcccgcgactgcaacggggacacctttagaacgaacggctccgatcggtgctcg

SEQ ID NO: 2821 - DNA, 102 bp, synthetic construct
  source 1..102: mol_type = other DNA
ccttgattttactgggtttcatctaacttggtcctattataactcaaacacctgctcgtgtcaaccccagaccaaaaaaaattgatttttttgtaccctcaa

SEQ ID NO: 2822 - DNA, 106 bp, synthetic construct
  source 1..106: mol_type = other DNA
caaacaaactacataataaaattctttttgctaaaagtgctttatttggtgtagttagcgaaaatgttctatgataaaaagaaaacggagaaaaacatcgaaaaaa

SEQ ID NO: 2823 - DNA, 105 bp, synthetic construct
  source 1..105: mol_type = other DNA
gacggcgtagtagtaccaggagcgtcggggtgccccctgttgtaccacacgcgaccacgcgatgccagaaaacatgcacccattgtacgatcgctcaatgaccgt

SEQ ID NO: 2824 - DNA, 113 bp, synthetic construct
  source 1..113: mol_type = other DNA
gcttgaccaattgttgccatggcaaaaggatatctaagaataaccctgccgggcacgcggcgggtgtgttccattaggcccgccgcctatgcacgatctggacaagggctgga

SEQ ID NO: 2825 - DNA, 106 bp, synthetic construct
  source 1..106: mol_type = other DNA
cgctgctgacctgcggttttcttgactgttgtttatgatcatacgggtcatcgtatcatcgctggtcacagtgcatgtagggtcgaagcgtgatcgatacacgtaa

SEQ ID NO: 2826 - DNA, 102 bp, synthetic construct
  source 1..102: mol_type = other DNA
tgtgggcttttctttgcctagtgaattgattttaaagtgttcatatcgctttagtaaaccaaacacttttaaatcattttggctaaaataaactttgttaga

SEQ ID NO: 2827 - DNA, 109 bp, synthetic construct
  source 1..109: mol_type = other DNA
ttttagtactgcaaatatataaataaaaaataaacctacaaaatagtataatcagagaaaacggaagatacaattatgcaggtttataaagtactattaatcaataatt

SEQ ID NO: 2828 - DNA, 110 bp, synthetic construct
  source 1..110: mol_type = other DNA
acgtttattcaaggttaacagatggtttcttgtagaccttttgacagactgatctcgtagaagattacaataggtctaccaagtcttgagctgctgccatgcctaccgca

SEQ ID NO: 2829 - DNA, 112 bp, synthetic construct
  source 1..112: mol_type = other DNA
ttaaagtatcataaacacttgctttcttacaaccccgtggtttacaatgatggtctgggcgggcagaccccgagaaaaccacgagttaaaaaaacgcttatttattatattt

SEQ ID NO: 2830 - DNA, 106 bp, synthetic construct
  source 1..106: mol_type = other DNA
actgacaccgaccctttcagcggagacaagtcagcgttggactgacagcaccgccacacacccagcatagctcgtctctcgaggctgggacgacgagcaagccccc

SEQ ID NO: 2831 - DNA, 103 bp, synthetic construct
  source 1..103: mol_type = other DNA
ggacaacttttggtacttgattatatttcgacttaattaagtacagttccacctagagatagactaaataaagtattattataattaagttccttttccaaaa

SEQ ID NO: 2832 - DNA, 104 bp, synthetic construct
  source 1..104: mol_type = other DNA
gctctagtagcttgtttatttagattatttagtacctcgttatctctcgctggaagaagaagaaacgagaaactaaaattataaataaaaagtaacctattttt

SEQ ID NO: 2833 - DNA, 112 bp, synthetic construct
  source 1..112: mol_type = other DNA
tcgcccccgcggccgccgtaccgccgaactgctgggtgatgctttggctaatcttcatcgagtagaacattattagaaccctcacattcgctaccatcgttccagcagctcg

SEQ ID NO: 2834 - DNA, 105 bp, synthetic construct
  source 1..105: mol_type = other DNA
acaacaatcttacagacaagaaagtaaaagatagcatatctgataaattagctgacgctaaatttgcaaatatgctatcattttcttaactttgcagcaaaatta

SEQ ID NO: 2835 - DNA, 106 bp, synthetic construct
  source 1..106: mol_type = other DNA
attctatgtttccaattactggctgttgcattgcacttttattaagagtactgatgctctcatcacaaaaatgcgatgcagaagtaagttttttagaatcgtttgt

SEQ ID NO: 2836 - DNA, 111 bp, synthetic construct
  source 1..111: mol_type = other DNA
tcggcaaaattgattgatacgatattgaatgataccaatatctttaactatgggagtccggagtttcacatagttaaagatatgtaaccacaactcacgcttaccttgcct

SEQ ID NO: 2837 - DNA, 106 bp, synthetic construct
  source 1..106: mol_type = other DNA
tttatcaaaccatacaccgcagtccgtgggcagaaaacttaccaccttgcgagagcaaagggttcggttttctgccacatctataatttcatattgctttattctt

SEQ ID NO: 2838 - DNA, 107 bp, synthetic construct
  source 1..107: mol_type = other DNA
tgatgtgatgtcgctcttaaaattcagaagaaatgtgctaagtttatggcttgctaataaaaaacagtttccctcgggagagttgggtgatttaatgcagttatgtt

SEQ ID NO: 2839 - DNA, 102 bp, synthetic construct
  source 1..102: mol_type = other DNA
tctttaagtaatatcgttatcagccttacttgcgcaaccgtgttcctccatgtgcagggtgttaattgcgcaaatgctatatgtatttcccccagactgatt

SEQ ID NO: 2840 - DNA, 105 bp, synthetic construct
  source 1..105: mol_type = other DNA
ggcagcagccttgctggggttttctattttgtactaacttaacacagcccacgggtagtgtcacattagtacaacactacccaaaaacaacacccgtgatattct

SEQ ID NO: 2841 - DNA, 120 bp, synthetic construct
  source 1..120: mol_type = other DNA
gaggctaataaagtctcttttttttgcggtgttattacttgcgtttgtaatgggccatcttaacgaaagcatacaaacgcaagtaataaccaagactgatgcgtcagtacttcacatcaa

SEQ ID NO: 2842 - DNA, 115 bp, synthetic construct
  source 1..115: mol_type = other DNA
tcgaagttgattggaaattttgagcaagtttatacgaattgtgggtatggatgaatccctgcccacaagttgcataaaaaataagcccccggccaggaaaaatcctaaaccgggg

SEQ ID NO: 2843 - DNA, 108 bp, synthetic construct
  source 1..108: mol_type = other DNA
taggctccgaaaagccttgtatttacagtgttcctaataggaagtaatcatatgattagcgcctattaggaaaacacactgtcaaaggggtttgtagcgggggttagc

SEQ ID NO: 2844 - DNA, 110 bp, synthetic construct
  source 1..110: mol_type = other DNA
atgagagggaccctttacacagttcagcggataagtcccgctaaatgaatttctcccagccaacatttatttagccggggggttaaacttcctgcatgacccttgcacgc

SEQ ID NO: 2845 - DNA, 105 bp, synthetic construct
  source 1..105: mol_type = other DNA
atggcggggcgtttcgtcgttccgggctcatatcggttcgcgatacaccgtgcacatgcgtgtgcgtcaaccgataggagccgcccacgacgggatgatctgcac

SEQ ID NO: 2846 - DNA, 104 bp, synthetic construct
  source 1..104: mol_type = other DNA
gtttcagccggaatttccgcctctcctgcgtctaacaaaagctcctcagctctgcaagggggaaacaattcggagacgcagaaatagtcctgaatggttgcgaa

SEQ ID NO: 2847 - DNA, 111 bp, synthetic construct
  source 1..111: mol_type = other DNA
gacggcgggtgacgactcagcccttggacgtagacgttgttccaaaccggaactccaccacatcacagtgtcaataaacgttatggtggacacatggacgccaccaccgct

SEQ ID NO: 2848 - DNA, 107 bp, synthetic construct
  source 1..107: mol_type = other DNA
gctcagagaacgcttaatcatttgatttcaaacaagaaactcagatgatttggcggagcggatgggcctggcgtccaaccttctctatcttctaaattattgtttta

SEQ ID NO: 2849 - DNA, 117 bp, synthetic construct
  source 1..117: mol_type = other DNA
taaagaaatgtaaatcatcttacagctctttacagcaggagcgaaaaagctcccgacgatgaagagcatcgacaagtagaaatgccgtaaaaccgcaatttatcaaggctttctaga

SEQ ID NO: 2850 - DNA, 105 bp, synthetic construct
  source 1..105: mol_type = other DNA
tcgtatataccataaaggtttaaggcgttttcctacattggaactatatcattcagataatttaatatcaatataggaaaatatccatccttgtgtaaggcatat

SEQ ID NO: 2851 - DNA, 104 bp, synthetic construct
  source 1..104: mol_type = other DNA
tcgtggtaaaaaagctgcatattttttgtagcaatgacttgacatcctcgggggaggacgttataataaggttacattgaagaaagtcagtaaaatcaagtgtt

SEQ ID NO: 2852 - DNA, 102 bp, synthetic construct
  source 1..102: mol_type = other DNA
tacatggcgtttgtatggtggatattcgtcgcacacgtatctaaccctatacataggattacccatgcgtgcgaccaaaaaggagagacacgactgcatgta

SEQ ID NO: 2853 - DNA, 103 bp, synthetic construct
  source 1..103: mol_type = other DNA
acatctgaggaaatcacatcccgttacgcggcgtttcggcagccttttcggaggaaaacgcggtgaatccgccacgtacgcgtcatccgcatacatatttcag

SEQ ID NO: 2854 - DNA, 109 bp, synthetic construct
  source 1..109: mol_type = other DNA
ctgaaggatcgttcaaccgatcactttggccttaactgatcggcattagcgatctgggttaatgccgttcacttaagagtgaacggcatttttgttcttagcataccgt

SEQ ID NO: 2855 - DNA, 103 bp, synthetic construct
  source 1..103: mol_type = other DNA
cctcctttccaagtttttgttattttctctgtccctaaaaggttaatccttttgggaagatttgtcaaggacataaacaaaatttctttgacaaatttatatc

SEQ ID NO: 2856 - DNA, 113 bp, synthetic construct
  source 1..113: mol_type = other DNA
ctagaaaagaatatgagaaaaaagtaggatagaaaaaatgtccacaacaacaatacacacatgagtgttgttgttagtaccatttttataaaaatattgatactcttaaatac

SEQ ID NO: 2857 - DNA, 107 bp, synthetic construct
  source 1..107: mol_type = other DNA
gcgacggttaatctaaattcccttaaatttcaaatgtgtaatagaaattaaaatgaaaactataaattctatcgtacaactctgataagctgattcctcatccctac

SEQ ID NO: 2858 - DNA, 108 bp, synthetic construct
  source 1..108: mol_type = other DNA
tacgaaagaccgcaaaaaataggttgctatgtgcaaaagtctacggtaatatgtgccggacgagataaaggagaagatgggccatccgaaagaccgcaaaaaataggt

SEQ ID NO: 2859 - DNA, 109 bp, synthetic construct
  source 1..109: mol_type = other DNA
gccagagttagtttccgcaggtcagcgggtgcatgtcgacagtacgacgcgtacgcgatagtctcttacacatgccctctccgctccgcgctctgatcctggtccgcct

SEQ ID NO: 2860 - DNA, 102 bp, synthetic construct
  source 1..102: mol_type = other DNA
tcctcgtgttcatacgacaataacacgtctgtgttagtgcgctaataagcatacaaccccacgcacaaacacacaacaaaaatggccccgaagggccactgt

SEQ ID NO: 2861 - DNA, 109 bp, synthetic construct
  source 1..109: mol_type = other DNA
agatcacgctggcgctagacccgtcgtagccagtgcatgagtggcgatgtggtggtgagtggaggcgcactcatgcacacgacgttatccacaggcgggctgtggataa

SEQ ID NO: 2862 - DNA, 106 bp, synthetic construct; identical to SEQ ID NO: 1278
  source 1..106: mol_type = other DNA

SEQ ID NO: 2863 - DNA, 109 bp, synthetic construct
  source 1..109: mol_type = other DNA
cttttgacttcacaacggcaggctaacagatcggcatatgagtgctatctactgctggcagtgaactgtactcagacgcaaataagcagatgatgtttctacaggtcag

SEQ ID NO: 2864 - DNA, 114 bp, synthetic construct
  source 1..114: mol_type = other DNA
acaaccggaaagatgatattcccaaacagtattattaaaaaccgcatcacttatgatacggttctgcgtatcataagtggatgatattttatatacgattaattcacaaaaaaa

SEQ ID NO: 2865 - DNA, 105 bp, synthetic construct
  source 1..105: mol_type = other DNA
aaacacaggaaatatcagtgttttcttatgttttcccttaattataaggttcatgtgttcattataactaggggaaagttattgtaaaaaaatttgcagtcttta

SEQ ID NO: 2866 - DNA, 102 bp, synthetic construct
  source 1..102: mol_type = other DNA
tagacggaaatcggtaaatttaaaaaaaccgcctttttgagacttacattaaagcatagcgactgattgggggaaagaagaaaatgaaaagattagtactat

SEQ ID NO: 2867 - DNA, 107 bp, synthetic construct
  source 1..107: mol_type = other DNA
ttttctttattatcaacggaatgctttctagagatcagtgctcgctcagggtctgtctggtgaatactgatcactcttttgagttttgagtttgatgaatgtttatt

SEQ ID NO: 2868 - DNA, 104 bp, synthetic construct
  source 1..104: mol_type = other DNA
cactcaaccaacaccttgatacctagagagtgtgtaaccaacatctcactcccgaaaggtacccgttatgcactccttctcataaaattggtacatgacgcgat

SEQ ID NO: 2869 - DNA, 107 bp, synthetic construct
  source 1..107: mol_type = other DNA
atgtcctcgccgaagccgtcgtagcttcggtgtcttttgaacacaactggttccagttatcaaccaatgacaccgaaaatcttcgccgactgggcaattgactccgc

SEQ ID NO: 2870 - DNA, 107 bp, synthetic construct
  source 1..107: mol_type = other DNA
tgtatgatatggagagagaagcaagttaaaatactgttactaactctaacttatcataattactttgactaaaatacagaaatacgctagaccctttaaaaatctag

SEQ ID NO: 2871 - DNA, 111 bp, synthetic construct
  source 1..111: mol_type = other DNA
aaccgcaccctggagggtgctttttcatctccactagcacccctaatgcaattaagatttctattctaataacaatagtggtgctaaaaaggaatgatctgtacctcatct

SEQ ID NO: 2872 - DNA, 110 bp, synthetic construct
  source 1..110: mol_type = other DNA
gacagcggcgcgcaccgcttgactgtagcactagttctgctagtttcgattccacgcgacaacaagcccaacaaagtcgcatatgtcgaaaggactcagccccatgacga

SEQ ID NO: 2873 - DNA, 108 bp, synthetic construct
  source 1..108: mol_type = other DNA
actgtgacactttgagctaaatattttatgggatgaactgtgctcaaccataaagatgattaattacagttcatcctcattacatatctgattttacaagggttttag

SEQ ID NO: 2874 - DNA, 106 bp, synthetic construct
  source 1..106: mol_type = other DNA
atctgccgtcctgaatattgtatcatttattttgtactaattatactgccccaaatggggctaaacacttagtacaaaacagattataaaaaatctacagctttaa

SEQ ID NO: 2875 - DNA, 103 bp, synthetic construct; identical to SEQ ID NO: 1274
  source 1..103: mol_type = other DNA

SEQ ID NO: 2876 - DNA, 103 bp, synthetic construct
  source 1..103: mol_type = other DNA
acctaactgacaacgtaaatctttttttggggtgtaatagttgacataaggctcctatgtgtgtcacattacaccccatggcaaatgcatatacctatattcg

SEQ ID NO: 2877 - DNA, 110 bp, synthetic construct
  source 1..110: mol_type = other DNA
gtaaagtggcacactaaagcaaacttaaaaactgtggtatacatgctaacagcgtgccgttccaatgtaaaccactgtagttttcgcttacttgatttctaaaagctcaa

SEQ ID NO: 2878 - DNA, 104 bp, synthetic construct
  source 1..104: mol_type = other DNA
ataaattattattttttcggtgcttttccagtgtcttattgcacaacaaagctggctttagtatgttaaaagacactacggatcggagtgtcttgaaatgccaa

SEQ ID NO: 2879 - DNA, 102 bp, synthetic construct
  source 1..102: mol_type = other DNA
acaccattgaacaagctaacaataaaaccacctcactagactagaacagcccacaattctaatcaagtgcggtatggtaaagacttgtaaacccccgtaaaa

SEQ ID NO: 2880 - DNA, 104 bp, synthetic construct
  source 1..104: mol_type = other DNA
ataactaacggttttactcgtacatgattatctacaatcgatataatactttgatatcatattaattggattaatcaagaccgtgttatcagattgtaccatca

SEQ ID NO: 2881 - DNA, 108 bp, synthetic construct
  source 1..108: mol_type = other DNA
ttcttggttctgattgagctttcaaggtattttttcgagtttaatgtatctttacaatattatttttttattaacttagctacattttctacgtgtggagactactat

SEQ ID NO: 2882 - DNA, 102 bp, synthetic construct
  source 1..102: mol_type = other DNA
tctctatatatcaccttataaaactttcccctttaatactaaaattaacggtgataaacttgagctttaacgggaaagatttatactcgttgtttcaaggct

SEQ ID NO: 2883 - DNA, 114 bp, synthetic construct
  source 1..114: mol_type = other DNA
gagagttgtgtacagtttttaagttaatagactatgttagttgtggttacaacgctttgccgttgtgttgtcaactagcatagtatgggtgagccaatattctcaaaatacgat

SEQ ID NO: 2884 - DNA, 102 bp, synthetic construct
  source 1..102: mol_type = other DNA
tgactttagtctgtatgagtatttaattttgtaccctcagcgtaacgactttagggcgttactgtttgggtacaaaatttactcaaggttgattttgccaat

SEQ ID NO: 2885 - DNA, 108 bp, synthetic construct
  source 1..108: mol_type = other DNA
ccgacgcgatgaaccagtgcgctgactgagccccctttagaagcgttgtcctgcggcagtgcatctaaaggggcctcaccgcccgggttcgcaacgcggcacgtaaac

SEQ ID NO: 2886 - DNA, 104 bp, synthetic construct
  source 1..104: mol_type = other DNA
atcggggcggacggacgacgtcgacagggtgtgactgaatggatccgtgtgttcacacggttctaatcggacacacccgaaggtttaccatgtgcatatggcaa

SEQ ID NO: 2887 - DNA, 105 bp, synthetic construct
  source 1..105: mol_type = other DNA
tgctgattccgagctaaccaagatggccattgtatcattgccccggtattctcgaacatgggtgcagatacacaacgtaaatccaccgcactactaatgcacact

SEQ ID NO: 2888 - DNA, 105 bp, synthetic construct
  source 1..105: mol_type = other DNA
aatggacagggaagcagatagcaacccgaagtagttcttattgcctcacatttacaggtgtggggtattgaagactactttcggggagaatatgattctagcacc

SEQ ID NO: 2889 - DNA, 114 bp, synthetic construct
  source 1..114: mol_type = other DNA
aagaacgcttcggtcttgagtatgaccttgatacctattttttactaattgttgatttcttcaagaataaatccacatttggtaaaacatcattgaatggctctgaagccttgc

SEQ ID NO: 2890 - DNA, 110 bp, synthetic construct
  source 1..110: mol_type = other DNA
gcgcccgcatctggtcgcgggaatgggcattagtgtagtttcaatttcccgcccgtgaatacagggcatatactgcaactacaaaaaaggccaccgaaaaaaggtggcct

SEQ ID NO: 2891 - DNA, 102 bp, synthetic construct
  source 1..102: mol_type = other DNA
cgcgaagcggatattccaccaaattctgccagtcaactcgcatgattgagacgacaatcttgcgtgttgaccggcttggagattacgaacgaggagaacgga

SEQ ID NO: 2892 - DNA, 104 bp, synthetic construct
  source 1..104: mol_type = other DNA
tagacggctgttttcacgtgggtgactatacgggttcaagtcgggttacgtcacaaggtgacctgacttggactctgtttatttgcgctggtcaggcgggtttt

SEQ ID NO: 2893 - DNA, 103 bp, synthetic construct
  source 1..103: mol_type = other DNA
cagggccgcacggggttgcgaagatgccataccagagatgatgccccacggtagcctggggcgcaaactctggtactgcttggtgtcaagctccctgcgcggc

SEQ ID NO: 2894 - DNA, 118 bp, synthetic construct
  source 1..118: mol_type = other DNA
ttacggtaaaactaaacgatatttcgtctaaatcatatgtacttttaaattcattcaaccgtgacagaatagattcaaaagtacatacgtcagtaatgatcaatttagttcttttttt

SEQ ID NO: 2895 - DNA, 106 bp, synthetic construct
  source 1..106: mol_type = other DNA
ccgcgttaacaaggccactaagccagctagtaagtcccttaagcaatcttcgggttacctaacattgtgctagggtatttctcatgcgtgctgccgtttacctgcg

SEQ ID NO: 2896 - DNA, 102 bp, synthetic construct
  source 1..102: mol_type = other DNA
tggcggcagacctgatggcctctgatggtggtggttaccgatctctgagtatggtgggacaccgcaaaccactagagataaaactgcacgtcaacccggtca

SEQ ID NO: 2897 - DNA, 109 bp, synthetic construct
  source 1..109: mol_type = other DNA
atttttacctccttactagttaattcgaaaaaaatgtatcaagtgaataccatattaatagtgttcacttgatacatttaaaaattcaaaaatatatcaattctttctt

SEQ ID NO: 2898 - DNA, 103 bp, synthetic construct
  source 1..103: mol_type = other DNA
ctggtcggagcaatttcggtcgtgacatcatgatcggccagatatactttatacaataagttattttgcgaatgtatcgataagctatagcttagaaacagaa

SEQ ID NO: 2899 - DNA, 111 bp, synthetic construct
  source 1..111: mol_type = other DNA
cctaacatacagttgtttatagattataacaaagttacaaaattaatgttaataactggggttaactactctaattatgtaagtttattgttttaaaatatctaaacatct

SEQ ID NO: 2900 - DNA, 110 bp, synthetic construct
  source 1..110: mol_type = other DNA
gctcgggtaaaactcgggcggctttttctgtttttacttgtatgttcgtggagccagttcgtttgcaccacgatgttgtaaagtagattttaaactttaagctcgatctc

SEQ ID NO: 2901 - DNA, 106 bp, synthetic construct
  source 1..106: mol_type = other DNA
tcacaccatcaccatatgagatttattatcatatgtgtagcataccatgcaaccaaggcactaggcaatactacacacacaataatggttctcattaacgggggtg

SEQ ID NO: 2902 - DNA, 104 bp, synthetic construct
  source 1..104: mol_type = other DNA
aggtggggattgaattggggtatcgaaagtgtaacgtgttatgttcttacgaataagcgcgtaactcgtaacacttttccaataataactcggtgttgattttt

SEQ ID NO: 2903 - DNA, 100 bp, synthetic construct
  source 1..100: mol_type = other DNA
tcgttgagcacgttaggccccttcgaaacgcaaagttccctgagttatctgaaaaatggcgaccccggagtgacgctgacgtaaagatatatgctcaggt

SEQ ID NO: 2904 - DNA, 117 bp, synthetic construct
  source 1..117: mol_type = other DNA
gctttcaacgataaaatgccaccttatttacaacttttttttgcctctatttatgataaggttcaccgtgacaatttaaaaggcaaaaaacagcttcgggaatgcgtttcctggagc

SEQ ID NO: 2905 - DNA, 108 bp, synthetic construct
  source 1..108: mol_type = other DNA
aaatgtgagatgtcccttttggagtttcattgcctttaaatcgttacggtgaaccgtaccataaataagtagcggattggcttaaaatataaaccctttataattaat

SEQ ID NO: 2906 - DNA, 103 bp, synthetic construct
  source 1..103: mol_type = other DNA
tcaaacaccttaacgctcaaatcgttaacagtgtttgcgcttatacaagtatgcttgtgttgacgcaaacataaagcgcagccccagcatttacgcgcattcc

SEQ ID NO: 2907 - DNA, 105 bp, synthetic construct
  source 1..105: mol_type = other DNA
gcaaataattgtacaaaaaaatgtctaagattggttttatatcattaggatgccctaacaatcaagaaataaagtaagagacaaaacaaccaatcaacataatgc

SEQ ID NO: 2908 - DNA, 105 bp, synthetic construct
  source 1..105: mol_type = other DNA
gtatgtgggcttgaacagcccatatttttttagtctttgcttaacatcagcaaatgaggctgttatttgtggactaacacccgaaaaagcctgtaatttcaagga

SEQ ID NO: 2909 - DNA, 110 bp, synthetic construct
  source 1..110: mol_type = other DNA
actggactcagattagtccgtattttttatcgcactttagtgttgagagtatctgctctctaaaccaaagtgcaataatcaccaacagtattagaatatgttttggtctt

SEQ ID NO: 2910 - DNA, 101 bp, synthetic construct
  source 1..101: mol_type = other DNA
attgatttttattaacttcttttgtgcggaactacgaacagtttatcaatacgaagtgtacaaactcccatacaaaaataaccacgtcaattaagacgtgg

SEQ ID NO: 2911 - DNA, 115 bp, synthetic construct
  source 1..115: mol_type = other DNA
cttctaaagaggggctgagatgcttctcttttttttgtatatttaaaagacttatgacttatatattgacttctaagtatacgttttgatacactagagccaacgataaaggagg

SEQ ID NO: 2912 - DNA, 102 bp, synthetic construct
  source 1..102: mol_type = other DNA
tgcttgccatgtagtcaaggatgaacgtccgctaaaagtatgtctaggccaccagcaggacagatttttagcggatgtcctcgaaacccggccggaggacgc

SEQ ID NO: 2913 - DNA, 107 bp, synthetic construct
  source 1..107: mol_type = other DNA
gcgtcgtcataccacacatcctacgacactttggtggtatgctttagaacgtccagacgtgctagggcaaagcgccaactagtccaagcacaaagaggcccccgcta

SEQ ID NO: 2914 - DNA, 102 bp, synthetic construct
  source 1..102: mol_type = other DNA
acatacgaaaggcaacctcttatttttttaccacactataaagggcaactggggttatacttcgtggtatcttataactacggacactttttagcccttata

SEQ ID NO: 2915 - DNA, 108 bp, synthetic construct
  source 1..108: mol_type = other DNA
ttcgtgaagaatttattgagctctggtagcctgtctcggaattggaggagattggctgtgcaatatttttatatgtccgactctcattgactgattatgcaaaattgg

SEQ ID NO: 2916 - DNA, 100 bp, synthetic construct
  source 1..100: mol_type = other DNA
cctgacattgggttcaccgcgcattggttcctttcagagagtatagatgtctgtagtgtcttgttggtacatatgagtgcggggtgattttgcgacatat

SEQ ID NO: 2917 - DNA, 102 bp, synthetic construct
  source 1..102: mol_type = other DNA
caatcttacagcgcaaagcgtttaggaatgttgtaaaactagcaatgcttttgcaagatacttattttacaacattcgcaaacccacactaaatgcttgcgc

SEQ ID NO: 2918 - DNA, 102 bp, synthetic construct
  source 1..102: mol_type = other DNA
cactaacatggaattatatagtaaatcttcgtattctcgcagctctaccacatgctatgcttttgaaaatacgaagaattggaacgaatatgaaatacaact

SEQ ID NO: 2919 - DNA, 105 bp, synthetic construct
  source 1..105: mol_type = other DNA
gcggagctggatagcttccgaaaatagaagcaccatatgtaactgccaattggtaggtagtgccatatagtgcttccatgacaacttgtgccgtgtacctccgaa

SEQ ID NO: 2920 - DNA, 105 bp, synthetic construct
  source 1..105: mol_type = other DNA
cgttggccgctcccgcattgagcaacgtacatactcggggagcggttacgaacgttgctggacaatcagtatgcacgttggtcgtggccgcgcgtgagggaatcc

SEQ ID NO: 2921 - DNA, 102 bp, synthetic construct
  source 1..102: mol_type = other DNA
tagtttatagaaattaacatataaatatattgctttcgggtggtacaacattgaaaataacccccgaaagcgatacctaaataaagtaaaaaagactagatt

SEQ ID NO: 2922 - DNA, 110 bp, synthetic construct
  source 1..110: mol_type = other DNA
aaattctgaacactttttttgatgcaagatatgtattctactttaagctgcttccagcgtactatagaatacatattctttatcggacataatgagttcctcaatgatta

SEQ ID NO: 2923 - DNA, 106 bp, synthetic construct
  source 1..106: mol_type = other DNA
actgtgacactagaagcaaattttttataagagggtgaactatgtgtaactgtcaagatggatacatgtagtacaccctattacaatactgattctataactggaa

SEQ ID NO: 2924 - DNA, 108 bp, synthetic construct
  source 1..108: mol_type = other DNA
ataatctcaactcggattagggtgccatttttttgtattttgatcaactcatttgtataggttgcactttatacaaaaaatctaggtcattgaaatataacaacatcc

SEQ ID NO: 2925 - DNA, 102 bp, synthetic construct
  source 1..102: mol_type = other DNA
aaccttgatttaacttaattattgtatctgtcactattatactattctccccctattgtgtcaagttattgcttataattatatcacattatttatagataa

SEQ ID NO: 2926 - DNA, 106 bp, synthetic construct
  source 1..106: mol_type = other DNA
gacgcagcggctatcggccttcggtgacccgctcttaagtggtccggatatcccttgtcgggaccacttagaactggctcaaaaccagttagaagtggctcaacat

SEQ ID NO: 2927 - DNA, 106 bp, synthetic construct
  source 1..106: mol_type = other DNA
gccgggtagcgtacgtgctccctgaaaatgcggagagtgttttgctaactgtgacctcggtcaatgtgtgctaaacaccctccgtgacatccgggcgtacggcggc

SEQ ID NO: 2928 - DNA, 108 bp, synthetic construct
  source 1..108: mol_type = other DNA
ggtgcaatagaaataattttttaattaaaagatggtgtttgctaattatagtattatctacaattctaaaacaccatcttttaatttagtcaatattttataaaaatc

SEQ ID NO: 2929 - DNA, 103 bp, synthetic construct
  source 1..103: mol_type = other DNA
tatgttgtatttgatgtaattagattcgtagtgatattgcagattatagtgagaagaagtcggcaatgcaactacgaattgtgagaattttccatgctgcctg

SEQ ID NO: 2930 - DNA, 106 bp, synthetic construct
  source 1..106: mol_type = other DNA
tatttttttgattggaatgtgtcctgtttttcccactaaattaagttgattgtgatatactgtttctagtggagaactaggtgagcttcaaatgaccgctttttca

SEQ ID NO: 2931 - DNA, 116 bp, synthetic construct
  source 1..116: mol_type = other DNA
tataataagtgaattcataatatatagaacacaacctattttttagttttatttgtggtacgcttctccttatcagtgattttgcaaaaaactagccaatcatatagttcttaaga

SEQ ID NO: 2932 - DNA, 107 bp, synthetic construct
  source 1..107: mol_type = other DNA
ggtcagggtcaccaggtcagcatagcgtctacaaatggtgttccgcgggcgtgggcatacatttgtagcccgcacgcctgacgtggggacacatcaagaacgtcggc

SEQ ID NO: 2933 - DNA, 114 bp, synthetic construct
  source 1..114: mol_type = other DNA
aataacagaaaaaaggcacacattcagtagttgatgttaatcaatcatacctatgtgcgccattgtttgacctcaactttctttattttccgattgctatataataatatatag

SEQ ID NO: 2934 - DNA, 107 bp, synthetic construct
  source 1..107: mol_type = other DNA
agaaaaacgccctcaaataggtattttgcgagtgtagtaaaaaataaatttcacaaaagtgaagttttatttttactacattatttttctatgctatactttacttt

SEQ ID NO: 2935 - DNA, 102 bp, synthetic construct
  source 1..102: mol_type = other DNA
cttcattcagtttagttgatctatttaggttgtgtagcaataacatctgcccgcaaatattgcaagtacacaaccttatttctgagaagtattaatatgtct

SEQ ID NO: 2936 - DNA, 103 bp, synthetic construct
  source 1..103: mol_type = other DNA
ctcagcttcatagctgggggctttttcatgtagtacctaaatatctttgtccagcagaagatattccgataccctatgaagcatgaaggcttcaatatatgcg

SEQ ID NO: 2937 - DNA, 107 bp, synthetic construct
  source 1..107: mol_type = other DNA
caaccgtcacgataattgtgttttcctgtagttaacattcgacactggctgtctgtctggtgtagaatcttaacagcatgttacaatacataaaaattgagaactat

SEQ ID NO: 2938 - DNA, 107 bp, synthetic construct
  source 1..107: mol_type = other DNA
agttcatcgactgctccctgttcactcagaaggttaattacatctaatgccttctgcagcaacattattatctatcacatcaagatgaatcgcttcacttccgcttt

SEQ ID NO: 2939 - DNA, 112 bp, synthetic construct
  source 1..112: mol_type = other DNA
tgaggtcgacagtcacccattagaggggaaacggatccctgttgggtgcttcacctggcagacataccgacaagggatcctaattctggtatccaggtgtcatgagcgatgg

SEQ ID NO: 2940 - DNA, 104 bp, synthetic construct
  source 1..104: mol_type = other DNA
cgtttgctgtaaggcgtgatccttgggtgtctgtgcagactctcacgaaagtgacggtcggtgcaggcacccgaggctcaacgttgggtgatttaccggacgct

SEQ ID NO: 2941 - DNA, 106 bp, synthetic construct
  source 1..106: mol_type = other DNA
gaatgtcttgtaagcatccatctttgtagttatgcactgtacatttgctctctgtctaatgtatagtgctaacttacattttgtagtatggtgtaactatgagaaa

SEQ ID NO: 2942 - DNA, 102 bp, synthetic construct
  source 1..102: mol_type = other DNA
gaatcgtttcataaatgaactaataaaatggtgtaaaggtacaccatatcctaacaatgtagtacaatacaccacttaatgtataagagacataagtggttg

SEQ ID NO: 2943 - DNA, 102 bp, synthetic construct
  source 1..102: mol_type = other DNA
ctcttgtagattgtgcattctagcattttatacaaaagcctcctgtcattgcaatgagtggcactttttgtagaatttataagggtcggcacgcgcgtcttt

SEQ ID NO: 2944 - DNA, 104 bp, synthetic construct
  source 1..104: mol_type = other DNA
aatcaattcattattgaataaaaatattgtggaaaggtttgcgatgatttgacattgaaaatatgtggttccacaaaaaaagaatattaagaactaatatggct

SEQ ID NO: 2945 - DNA, 105 bp, synthetic construct
  source 1..105: mol_type = other DNA
ttgtgtatcaggagttagttacaaattattttagggaaaggtagcgtagtttattagtgttgtgataccattccctgaattaaggtgattttcgagggaattatg

SEQ ID NO: 2946 - DNA, 111 bp, synthetic construct
  source 1..111: mol_type = other DNA
cccatactaaaacacctgcttatcaaccaaaagtaggatttatatctttaggctgcccgaaagtcaaaaataatacattctttttttagccgatttatttgcgtccaaaag

SEQ ID NO: 2947 - DNA, 108 bp, synthetic construct
  source 1..108: mol_type = other DNA
cgtggaaaaaaaaacaacactatactaccaggattttgtaccacattcttagcacgttgtggtacattgtccagcattagcgaatggacttcacgacaccgaaccgcg

SEQ ID NO: 2948 - DNA, 111 bp, synthetic construct
  source 1..111: mol_type = other DNA
ggtttgttcaagaacagggtaacttagttcaggtattataaagaacatcaatccagattgagtatccgcttgatagcaaatttcatcaggcgtatgctcatttcaatcagt

SEQ ID NO: 2949 - DNA, 106 bp, synthetic construct
  source 1..106: mol_type = other DNA
acctaaatataataagtttcaggctctttgtttgcaacaggtatgcatctcatttgttatgcatatcttttgcaaacataaatgagaatgatcactggaatttata

SEQ ID NO: 2950 - DNA, 102 bp, synthetic construct
  source 1..102: mol_type = other DNA
ctggtgccgaaaaaaatcacttatctttacgtccatttgacatatcatcgtctgacgaaaagacgaatagacgtagaggaaaatgccgagaaaaacagggga

SEQ ID NO: 2951 - DNA, 102 bp, synthetic construct
  source 1..102: mol_type = other DNA
agtcggtatgtactgctactggtatagtgttactatttggaacggggatagtagtccccttgccaaatagtaacacactttcgtatgattgataaatatcgt

SEQ ID NO: 2952 - DNA, 109 bp, synthetic construct
  source 1..109: mol_type = other DNA
atcattattaaatcctcacaaaattaatttgtaagattcgcaagtcctttttggtgaacttttgaatcttacaaaatcatacagcataggctctgctagtcaatccaca

SEQ ID NO: 2953 - DNA, 111 bp, synthetic construct
  source 1..111: mol_type = other DNA
tatacggttgaggctcaatcaaagcgataggtctccaagaacataacgctagcagattgtgtccgtgaagacctacaatgtaggctgccgccatcaacacacgcagtaaca

SEQ ID NO: 2954 - DNA, 109 bp, synthetic construct
  source 1..109: mol_type = other DNA
accggcgcccgatccgcggggtgaggcaccggtggcgtcaaaaccaacatgttgtcttgtcgacgtgtcgggtttgaccggcgtacctaccaggcaacgagggaggtcg

SEQ ID NO: 2955 - DNA, 105 bp, synthetic construct
  source 1..105: mol_type = other DNA
ttgccagacatggcgtgaccctaggtcttgaacatctcagttgacaagaccggtcttggcggtcattatgtggaacaagatccaaaacagccccgggcagcgttg

SEQ ID NO: 2956 - DNA, 109 bp, synthetic construct
  source 1..109: mol_type = other DNA
gtaggtgcagtacgttgagtcgaaattattttcctaaaagtatccagcttagggtgatgagtgctaccctttggagaatattcaagagagcacaatcatgagtaaaacg

SEQ ID NO: 2957 - DNA, 105 bp, synthetic construct
  source 1..105: mol_type = other DNA
cttgcatacagccgttcttgtaattgtgtgattggttacgttgagcgtctgtccagtgtaaccaattgaactgctctagcctttcatatacaaattcacgataag

SEQ ID NO: 2958 - DNA, 106 bp, synthetic construct
  source 1..106: mol_type = other DNA
agttggttaatagccgcaggtcagagacctgttggaccctcaatccactcccacgcgatgagtgtgggaccaacaggttatgacatgtcccctgagctgtgcaaag

SEQ ID NO: 2959 - DNA, 102 bp, synthetic construct
  source 1..102: mol_type = other DNA
cttattgtttagggtggtcttgtagtattcagtcttcataacttgtcatttgagtagcatagaatgaagacggaataaaagtgttaaataatccattcaaaa

SEQ ID NO: 2960 - DNA, 111 bp, synthetic construct
  source 1..111: mol_type = other DNA
atccaaatagcatggttttttagtggttttctgtaggttttgtatcattacacaacctgttcaagttatgttaggttacaaaacatcatctccacagctttcagaccatga

SEQ ID NO: 2961 - DNA, 111 bp, synthetic construct
  source 1..111: mol_type = other DNA
aataacttttaattttaaaaagcatgagttcgattatatcgaccaatatggctccataatgtatttagtcgaactttttgattaattacataaaaattaaagagtacgtgt

SEQ ID NO: 2962 - DNA, 106 bp, synthetic construct
  source 1..106: mol_type = other DNA
aaaagccgcagttatatgcggcttttcctcgtgtatatcattattgtgcagaggaatatgcacatcaatgatgtatatgatacctgtggaaaatcaaatcagcgaa

SEQ ID NO: 2963 - DNA, 102 bp, synthetic construct
  source 1..102: mol_type = other DNA
cccttgattttgcttggatttattgtactgtcatcattatatcattagcaccctttgatgtcaagagaatgataaaaaatttttaagatttttacacctact

SEQ ID NO: 2964 - DNA, 103 bp, synthetic construct
  source 1..103: mol_type = other DNA
cccaatgttcgggccgcctttttgtagtatgtatagagtttatgtacctattcgccagtacacaatctttatacatagtgggcgcgctaaagccttgggaaga

SEQ ID NO: 2965 - DNA, 109 bp, synthetic construct
  source 1..109: mol_type = other DNA
aaaagccctgttttatgggctttttgttgtacttcatacagcgtctagtgtatcaacattagacacagtatgaagtacagtttttaattcgtatattgcaaacaaattt

SEQ ID NO: 2966 - DNA, 103 bp, synthetic construct
  source 1..103: mol_type = other DNA
agcggctcgttgacctgcgacgtcatacacgtcacacggacggtttcggggaccctaagcggatgagtcacgtgtaaagtgcgggtcatgaagccgcagcgtg

SEQ ID NO: 2967 - DNA, 102 bp, synthetic construct
  source 1..102: mol_type = other DNA
cctactcaacacaaaggaaaatctaatgttgtgcataaatacacggctctactgccccgtcaatatatgcacaacaaggaaaatgccgtaaccatgcggctt

SEQ ID NO: 2968 - DNA, 102 bp, synthetic construct
  source 1..102: mol_type = other DNA
taggaaaagggccggccggcaggccgatgggtctaattggacataaattaaggacatggggccaaataaacccgccgcgaaataattttgtgttcaaaacgt

SEQ ID NO: 2969 - DNA, 102 bp, synthetic construct
  source 1..102: mol_type = other DNA
ttgtagtgattccataggagcaattatcggttggttttgtaaataaagctagagtttgtttcataaatgcatttgttttttactcctaccgaatcatgttat

SEQ ID NO: 2970 - DNA, 112 bp, synthetic construct
  source 1..112: mol_type = other DNA
tatttggagatgttgttgtttacgattaagtaccaagggttatgtatgattcatctccaccatcaattaaggcgaaaatgtaaacttcgcctgtaataaagaaggccagaac

SEQ ID NO: 2971 - DNA, 105 bp, synthetic construct
  source 1..105: mol_type = other DNA
catcgagtttaggaaccatctgaaataataggtgtatttagaccttgctaatcctcgacagacacgtttaaatacaccacctaaagcgatacaatcgcgctatta

SEQ ID NO: 2972 - DNA, 102 bp, synthetic construct
  source 1..102: mol_type = other DNA
cctgcgggaacggcccgctaccggtgaggtcccagggtgttggacctacaccggtagaccctacaccctggcaactcagaaagtgccagttcagagcacaag

SEQ ID NO: 2973 - DNA, 116 bp, synthetic construct
  source 1..116: mol_type = other DNA
agggccgtttttatgcttggcatcacgaccgacgaggcaggagcaccccttggcagcagtgagcaatctgaacgtaccaaagcggtaccctaccatcaacatgtgcgagcgttgat

SEQ ID NO: 2974 - DNA, 107 bp, synthetic construct
  source 1..107: mol_type = other DNA
tcctgttatttattgacatgatacgtgcggcatttattagcacttacataatgcagtccctatggcatatagtttatgctaaaatttttttaactgtatttcaatat

SEQ ID NO: 2975 - DNA, 107 bp, synthetic construct
  source 1..107: mol_type = other DNA
gcggcttcagtcgaagaagcgggccaggtgggaggagggcggggcgggggcgtccggacgtttgcggggccggcccggtccgggctggttgacgcggatcgcgtcga

SEQ ID NO: 2976 - DNA, 102 bp, synthetic construct
  source 1..102: mol_type = other DNA
aaagatgatttataagtggtaatttttttattacatatgatacgtgggctaaatctcacgttttatatgtaacaagataaaaaacctcctaaggaactgatc

SEQ ID NO: 2977 - DNA, 102 bp, synthetic construct
  source 1..102: mol_type = other DNA
cggctccgggtaggttctatctcattttattagaaaatagcttaccgtggtcacagggtctagctgtttctaataattgtgatctaggtcgccaagcgggtg

SEQ ID NO: 2978 - DNA, 103 bp, synthetic construct
  source 1..103: mol_type = other DNA
tatgcggttccttctgtcggttcgtgccgttgtaattctgaatagtcgactacgcggcgatgtgaatttagcatcgggtgctaaattggtcaacatgcgcgcc

SEQ ID NO: 2979 - DNA, 109 bp, synthetic construct
  source 1..109: mol_type = other DNA
tccctttatggaatatgataccgaaatatcgcaattacataaagcatgtacatgcatggtttatagtattgcaaccattctaccaaatattaactttacattagataaa

SEQ ID NO: 2980 - DNA, 114 bp, synthetic construct
  source 1..114: mol_type = other DNA
gctggaatcgccctgcttaggctgcaatttcttgtgggtctttcattcttcccttgaagaacagtagactgaaagaccaacaaatgctatgggctttcggagaggacaacttcg

SEQ ID NO: 2981 - DNA, 102 bp, synthetic construct
  source 1..102: mol_type = other DNA
cccttgatttttcttggatttattgtactgtcatcattatagcattatccccctacaatgtcaagtaattgctatataattttgtaaaattctctatttctc

SEQ ID NO: 2982 - DNA, 103 bp, synthetic construct
  source 1..103: mol_type = other DNA
ttcgggcattatgataagcgtcggcggtgcggtgtatctgctgtgcgaaaatactggaaatcctcatagctgcactcgtcaacgcctttcatcagcggcagag

SEQ ID NO: 2983 - DNA, 102 bp, synthetic construct
  source 1..102: mol_type = other DNA
ccttgtatttatcaatagatttcaacttcttttttactcacactttcggacacccgaacgtttgagtaaaaaagcatgggcgacgtccgttttttcgttcaa

SEQ ID NO: 2984 - DNA, 111 bp, synthetic construct
  source 1..111: mol_type = other DNA
acatattgttattaatctattgaaaattatatgattaatattatcgttgaatattggtcataatgccctcataataatgattataaatctaacattctgaaaatatcagtg

SEQ ID NO: 2985 - DNA, 110 bp, synthetic construct
  source 1..110: mol_type = other DNA
atctatcaacaaaaaccagtagttagggtggttcgcagttttgtccggaggggcgtaccaatttcacctataaaatcaaatgcataccaccgcgacaacatgaccggata

SEQ ID NO: 2986 - DNA, 112 bp, synthetic construct
  source 1..112: mol_type = other DNA
ctatgaagcgaaaacgagaattttacgttgcactttcgtagtctgttggtgtccgggccaccggatggtaacagactacgattaggggcaaaaattattccagcatgagccg

SEQ ID NO: 2987 - DNA, 102 bp, synthetic construct
  source 1..102: mol_type = other DNA
ggaggctgttgggcactccggatcaggattgaccaatgtggcccaatatgaaatacttcggctacattagcgcgagtttctgccgataaacggtaaggctcg

SEQ ID NO: 2988 - DNA, 103 bp, synthetic construct
  source 1..103: mol_type = other DNA
ctgcaaagatacgaagaaattttcagatgggcaaatctttctcgctatctgaggataacacaagacttttacccatcagagaaattaacgtttaatttattaa

SEQ ID NO: 2989 - DNA, 107 bp, synthetic construct
  source 1..107: mol_type = other DNA
ttatcatccattggaatgtttaattttttgttttatcaagatgtttcagctacagccgaagtgtttgataaaacggattactttgaatttgcaaagctcctcaaatt

SEQ ID NO: 2990 - DNA, 105 bp, synthetic construct
  source 1..105: mol_type = other DNA
cctacgacgcgcaaccgcacgcacgcctgccctatgcgcagcatgggagaacgtccgttatccctcgttgtgcataggctcccagaccggaacgacgtgcgccgt

SEQ ID NO: 2991 - DNA, 103 bp, synthetic construct
  source 1..103: mol_type = other DNA
gccattacggacgtcccggcctcatggatattctgagtcaggtaggtgagctggcattgaaacgtaatcattttattgcctgcgagtttatcctcagaccgaa

SEQ ID NO: 2992 - DNA, 102 bp, synthetic construct
  source 1..102: mol_type = other DNA
cttcccgaccatggtggcgactctaaacctgtcattgccttacctttgccctgtcgatagtcaagctatgccatacttagatgatgacgagagcggcgatct

SEQ ID NO: 2993 - DNA, 102 bp, synthetic construct
  source 1..102: mol_type = other DNA
ccttctaggtggatgtgaagaacggtgaccaaaatgcgacaccgttcgtgtaaagagtagcagtttggtaactgtcgtctagtctgtcttcatgcgagctgc

SEQ ID NO: 2994 - DNA, 106 bp, synthetic construct
  source 1..106: mol_type = other DNA
aaagaataaagaaaaagaacctaaactgagggttcgatttaggttcttactggcggcatcgagggaaccaaatttgaattttacccctataagtatagttttatca

SEQ ID NO: 2995 - DNA, 111 bp, synthetic construct
  source 1..111: mol_type = other DNA
gagagccgactcctcaactttgaggggtcggctttttctcttttttatcctgcggcctgatagtctcatgatgaaaaagagaaaatcaaagcataataaaaagggtctcac

SEQ ID NO: 2996 - DNA, 106 bp, synthetic construct
  source 1..106: mol_type = other DNA
ggatgtattgataatttgtaccatttttttgacatattagaacagttggtcttgctactgttgtacaagcacaaaaaattaggcacattttccatatgtgccttta

SEQ ID NO: 2997 - DNA, 106 bp, synthetic construct
  source 1..106: mol_type = other DNA
tcggcagtaaatcagcgcctgcatcgactgagtgtaacttgacttaacgccgaggcataactatggttcggactcagcacttggtagccgaaaggaacccgtcatg

SEQ ID NO: 2998 - DNA, 115 bp, synthetic construct
  source 1..115: mol_type = other DNA
ctttgtgtttataattacatctgcaaatataatataaaaggttacttgaaaaagattatacatattatcaatattaagtagccttttatgtatatgatttaaaatcaatacttta

SEQ ID NO: 2999 - DNA, 111 bp, synthetic construct
  source 1..111: mol_type = other DNA
aaatactctaattctacgctactaataactactgttattaactaacttgacaccagtgacaactaaactattaacagcattatgaatacccaatagataagaaaatgggtt

SEQ ID NO: 3000 - DNA, 111 bp, synthetic construct
  source 1..111: mol_type = other DNA
gcatcgttgtgcgagacttgatagattggtgcaattatataaccaccttgtccatcgtcgggaattaattgcactcaatccctgccccctcccagcggcccaaaccatcgt

SEQ ID NO: 3001 - DNA, 102 bp, synthetic construct
  source 1..102: mol_type = other DNA
tgtattccaatgttaatacaaaatgagtttactacgtaaaacgatttacagtaatatagtaatataggtagtgaactcatgaggtaggtaatggcgatagca

SEQ ID NO: 3002 - DNA, 102 bp, synthetic construct
  source 1..102: mol_type = other DNA
agccttgttttatgcggtgttgcggtggttgtctataaatacttgccccgaacggcgcatagatttatagacaactttgcctaaaggtttgataccaacacg

SEQ ID NO: 3003 - DNA, 103 bp, synthetic construct
  source 1..103: mol_type = other DNA
gtggtcatgtgtccagcctatagggcgggtcacttgacacacgagccccatacggggaacatcagtcaaagcacccgttgatcggttgcagacacgaaagggc

SEQ ID NO: 3004 - DNA, 104 bp, synthetic construct
  source 1..104: mol_type = other DNA
tttagtgatatggtatttgtagatagagtttatggattataagaggtttattgggcaaaacctcttgaaatacataaaaagagtttaatccaatatatcagtaa

SEQ ID NO: 3005 - DNA, 109 bp, synthetic construct
  source 1..109: mol_type = other DNA
atgacttgttgaaaatcactggattcggacgtacttcaaaccacatctccaatgtgatgtggtttgaaacacacccactcttaaaaaggataaaacccttggtttcatt

SEQ ID NO: 3006 - DNA, 103 bp, synthetic construct
  source 1..103: mol_type = other DNA
aaagagcgcttccccgacgccagggtacatagggagttaccccacagcgccccggcgatcgagcttaagtccctaggttaccgcacagaggggtgacgcaggt

SEQ ID NO: 3007 - DNA, 112 bp, synthetic construct
  source 1..112: mol_type = other DNA
aattcttgttctttagtctaatcaaaggtttgtatattagtttttactatgcttatagtttgaagtattatacaaactatatcctttgtgagaacagcaataatgatatcaa

SEQ ID NO: 3008 - DNA, 108 bp, synthetic construct
  source 1..108: mol_type = other DNA
ctgatcagggaaatccatgcctgagactagtccggcgtggactgcgtcgcgcaccactcactccccaattcgccagacttccggccgggtcgcgtggtagggcctgtg

SEQ ID NO: 3009 - DNA, 104 bp, synthetic construct
  source 1..104: mol_type = other DNA
attctctgaagacatgcaactccggatattggtgtttctaccctacaacatgttaatattgtcaggtaaatccacctacacgccaacaccatgccacgggccta

SEQ ID NO: 3010 - DNA, 108 bp, synthetic construct
  source 1..108: mol_type = other DNA
agaaaaaagtcaatttttgaaattgactttttcacagacaagatagcagtactgaagaaatagtactattttcttataggttatattctaaaaaaaatatctaattca

SEQ ID NO: 3011 - DNA, 107 bp, synthetic construct
  source 1..107: mol_type = other DNA
gaaaagtccatttgactaccttactgctactggctatgcacttatgctatcaccatttgctgaacacacaaatgaggagcgtcacattaactacaaccgtagcagta

SEQ ID NO: 3012 - DNA, 114 bp, synthetic construct
  source 1..114: mol_type = other DNA
gatccatataaaaataaaattactatttaatatgtattacatttgtcattcatgcattaccatagtagttaaatgtaatagataaattctagttttattacctagaatttatct

SEQ ID NO: 3013 - DNA, 108 bp, synthetic construct
  source 1..108: mol_type = other DNA
cggggtattggacataaagccaatgtactacactttttaattacatcaaacaatggttgagaagtatagtacagtcataccctgaagctgaccctcttttccgtgcag

SEQ ID NO: 3014 - DNA, 113 bp, synthetic construct
  source 1..113: mol_type = other DNA
tctgtaaatttgaaaggagaattgatatgtctctagcacaaatgctttataaagagacgggaagatcatcgggcgtggtttatgctactggtttattaaagggccgggaagta

SEQ ID NO: 3015 - DNA, 102 bp, synthetic construct
  source 1..102: mol_type = other DNA
tttaaactgtgacaggtctctcagaatgggatgcaataagaaatgtcaatttatgaggatttcttattacactctgaggatattatagattttacaagggtt

SEQ ID NO: 3016 - DNA, 116 bp, synthetic construct
  source 1..116: mol_type = other DNA
gggccgcgtcagacgcgacgacagtgcgttactacgtcctcagcacgaccactaccaccagcagtacgccgcaggacgtagtaacgtttgcggccctcgggggtgcggagtatccc

SEQ ID NO: 3017 - DNA, 118 bp, synthetic construct
  source 1..118: mol_type = other DNA
cttttggtccactctattttatagggtgggtctttttttgtgtccatttttacgttggtactaaccaatgtttatttggtgtcaaaaaaatagacattcatgtcaccgccgacgactt

SEQ ID NO: 3018 - DNA, 111 bp, synthetic construct
  source 1..111: mol_type = other DNA
aaggctaatgcgggtgtagatgacgcaatgcatggaagtaccttattgccatgctggtgccccgcaaaactgcaaaaaggtactaccggggctcaacctacggcgtcgctg

SEQ ID NO: 3019 - DNA, 103 bp, synthetic construct
  source 1..103: mol_type = other DNA
tgtcagcagcccgtttcacgatctgcgtgtagttccttgtaaactgacctaaagtacagtttacaagggactacacagggtaggtatctgaggggaggggttc

SEQ ID NO: 3020 - DNA, 105 bp, synthetic construct
  source 1..105: mol_type = other DNA
tctccattttattaacgagtgtatgagaacctttgattagtacgaacaatattactatgttattataagtaatcaaacaataattatcgtgttctatccatttgg

SEQ ID NO: 3021 - DNA, 106 bp, synthetic construct
  source 1..106: mol_type = other DNA
cattaagcattttacgtaagtgatgaattcccaataaaaatagaaagtttatatttattaactttctatttttattggctattgagacaaaaaaagaccactcaag

SEQ ID NO: 3022 - DNA, 105 bp, synthetic construct
  source 1..105: mol_type = other DNA
cgccttcctaccccagccacaactgaaattagtatccttcgttcaatcccatccaaatggcattgaacaaatgacactaaaatggcaccagctattcggccgatg

SEQ ID NO: 3023 - DNA, 111 bp, synthetic construct
  source 1..111: mol_type = other DNA
tagtaagttttgtaaaatcggtagagttatattgatataccacaaagtatccttgtagttaactagtatggtactatgtggtacatgactaatggttgagtttagataaat

SEQ ID NO: 3024 - DNA, 105 bp, synthetic construct
  source 1..105: mol_type = other DNA
tgattttgccggatttaatatcctccatcatccgcttaaagcccggacgttcaaaattgctgcctgtgtagccatcatctacaaaatccatcacaggcacatttt

SEQ ID NO: 3025 - DNA, 102 bp, synthetic construct
  source 1..102: mol_type = other DNA
attagctgctttttttgtttagttaaaataaccttttagtatacttcttacatgacaaatatataaaaaggttattgagaaggagacagaaacacatgggca

SEQ ID NO: 3026 - DNA, 104 bp, synthetic construct
  source 1..104: mol_type = other DNA
aaaacaatcgcttaattttgacatatgccacatgcacacctatatatttagtgaactaatagcgtaggtgtgcatatggtggtaacctccgcatcagttttcct

SEQ ID NO: 3027 - DNA, 109 bp, synthetic construct
  source 1..109: mol_type = other DNA
tcatttctgcttagctatgtcattttttatactgagaataattgactgttaggcttgcctaacatataattattcactgtttaaaattcacattcctgctgttagcatc

SEQ ID NO: 3028 - DNA, 103 bp, synthetic construct
  source 1..103: mol_type = other DNA
tggaaataatattcaatacacattaaattaagtattttgataactttagcaaagccatcacactacaaaatacatattttagtattaaaatttgctcttacaa

SEQ ID NO: 3029 - DNA, 103 bp, synthetic construct
  source 1..103: mol_type = other DNA
aatatgagacctaatcgtatcgttgttgatgtatgtgttataaattcaatgcaacaaacttataatagatacacttgatagtgatgtataaaatcatattagt

SEQ ID NO: 3030 - DNA, 106 bp, synthetic construct
  source 1..106: mol_type = other DNA
ttttttatacgaaatcacattaatttaccccctcattcaaaataactactgatgttattgtttagaatgtaacctttttataaatttgcataaaactaattatatt

SEQ ID NO: 3031 - DNA, 106 bp, synthetic construct
  source 1..106: mol_type = other DNA
tcgaccgaattccgagccagtcgatataggctatgtctacagtgactgagtggtgaacagagcagtctgtggcgaaccagtctccgtttgatattccctgataaca

SEQ ID NO: 3032 - DNA, 108 bp, synthetic construct
  source 1..108: mol_type = other DNA
aaattgtaacatatcatttgatttttcaaaaccattcttttgtatcaaatctcaactgaatatttgtacaaaagaatggtattatttttaaaaaaataagaactccta

SEQ ID NO: 3033 - DNA, 105 bp, synthetic construct
  source 1..105: mol_type = other DNA
agctggtcataccaggaaactactaggttttggatgacgtggctatctcctaggcgatagatatgtcagacaaaatgcactactgctaaagacgctggtagagaa

SEQ ID NO: 3034 - DNA, 109 bp, synthetic construct
  source 1..109: mol_type = other DNA
gattttaaaaggtctttttataataatatttttgtactaatattatattgccatcaggtaatgatatattagtacaaaaaaataaaatgaattattataaaaaattgat

SEQ ID NO: 3035 - DNA, 101 bp, synthetic construct
  source 1..101: mol_type = other DNA
ccaaagacaaaaggagctaagccttgcctaactcctctctttgttctattcgttagttattagtcaacccactacagctgacaaaaaatccaaatagtccg

SEQ ID NO: 3036 - DNA, 111 bp, synthetic construct
  source 1..111: mol_type = other DNA
cgatgtgttcatgtgcttcctccttgttcaaggaggtgcactttccatcccgtgcctcagcccccaatggaaagtgcaccccgtggcttggatcttaagtttaccgcggtg

SEQ ID NO: 3037 - DNA, 102 bp, synthetic construct
  source 1..102: mol_type = other DNA
taaacacaaggttttccgggcattcctataggtttatgcattttgggccaccggattgtaaaaaccaagaatagaaaacagcccctggaataaaggtttccg

SEQ ID NO: 3038 - DNA, 105 bp, synthetic construct
  source 1..105: mol_type = other DNA
aaatcaaagatatatgacttttcatagcaatatgcacacgtaatctttaagtgagctataggcgtaggtgtgcagtttgggtataattatctcaaagtaactaag

SEQ ID NO: 3039 - DNA, 106 bp, synthetic construct
  source 1..106: mol_type = other DNA
atacacgatattactttcgtttaatcattagcgttataaaataaccaaaacaggtgttttagttactttataatatttatcaattaaaaaatccgtactatcagat

SEQ ID NO: 3040 - DNA, 102 bp, synthetic construct
  source 1..102: mol_type = other DNA
cgcataacaatcctcctgttcaggtaaatttatatgacgatggggcaataaaagaatcacagccatcatctaaacaaatgaagaaaaaaccagttatcgtgt

SEQ ID NO: 3041 - DNA, 102 bp, synthetic construct
  source 1..102: mol_type = other DNA
agggttttcggggatgccgaaaaattttttgcacttacttgacacaatcagactaaccagttataataagggcaacggttagaaaccttgaaaacaaagggt

SEQ ID NO: 3042 - DNA, 104 bp, synthetic construct
  source 1..104: mol_type = other DNA
atatcacccgaaaactaaccccaaattaccgatagatataacaccctgacgaatacgagtgtcacatctatcaactatccccttcatacagcagaatcacaaac

SEQ ID NO: 3043 - DNA, 104 bp, synthetic construct
  source 1..104: mol_type = other DNA
accttgattaattttttttattacaagattgtcataaaggtataatggagggacgcttaagataacttaatgacaacttagtagataattaatacaaaaggctt

SEQ ID NO: 3044 - DNA, 114 bp, synthetic construct
  source 1..114: mol_type = other DNA
gtcgcggtgacgccgtccagtgggctcaaactcggtagtacagaaaccgtggaccacccgatggtgcgtagactaccgggctatggagctggcagcgatctacgagcgcatcag

SEQ ID NO: 3045 - DNA, 110 bp, synthetic construct
  source 1..110: mol_type = other DNA
tagatccatctatactgagctcagcaaaagattttgctgagcgtcttgtttggctccccacgcgggactcccaccgcaattttttccgccatcacttcagttttatgctc

SEQ ID NO: 3046 - DNA, 101 bp, synthetic construct
  source 1..101: mol_type = other DNA
cggtgccgctggtcgcgcccgacggtgcgtcctatccggccgacacgctgcctcgcgttcatggagttcggcggtcaggctgtcgagaaacggcatggggt

SEQ ID NO: 3047 - DNA, 102 bp, synthetic construct
  source 1..102: mol_type = other DNA
gcaaatatactaatataagtaacaagatattcaaatataggtaaagaatatctattcttagtatttatttaaccatcttgttacttagtgtacaaaagtact

SEQ ID NO: 3048 - DNA, 105 bp, synthetic construct
  source 1..105: mol_type = other DNA
aagctacagcagctttggaatgcttgtacagctcatgtatctaaactgtctcgcacacgcggggtgataaaccgtaaacaatcgttgtcatgttattcctctgaa

SEQ ID NO: 3049 - DNA, 105 bp, synthetic construct
  source 1..105: mol_type = other DNA
caggcttctcagggccgtctgacgcgtggtgtgcttggctacttgttacgtcgtcgaatgatcttgacgactccacaccggaggcgcatactcatgttcagtaat

SEQ ID NO: 3050 - DNA, 108 bp, synthetic construct
  source 1..108: mol_type = other DNA
gtatatggtgacatcaatactttgctcaccagtaaatgtagcgcaatcttctcatgatgtgatacaaaactcaggtattttcgggcctttctacgttagttcgcgcgt

SEQ ID NO: 3051 - DNA, 111 bp, synthetic construct
  source 1..111: mol_type = other DNA
ttttaccgaagacgaggtggacattatgtgttccaaggacggagacgacgcatgtggaaactattgtgttgatacaaaagaaaaactcgtagaaatcctttattttaggca

SEQ ID NO: 3052 - DNA, 108 bp, synthetic construct
  source 1..108: mol_type = other DNA
ttgagatcaactggaatgtctaatttttttcatacacatggtgctttgtcttaccaaaacaccaggtatatgaaaatttcagattgatgtaaaatcaccgatgcggca

SEQ ID NO: 3053 - DNA, 109 bp, synthetic construct
  source 1..109: mol_type = other DNA
tcttacagagaatacaacagagattactacagagaataaaaacacttttcgtccggacgtttcactgccggacgaaaaacaatcatcaccagttgagcgatttctggag

SEQ ID NO: 3054 - DNA, 102 bp, synthetic construct
  source 1..102: mol_type = other DNA
gatacagggcagcaggggacatgtagtaatcctagcggttgacatgcggcactgtcatgtgtcatcgtccgtactacttccacacatggaagagcccccgct

SEQ ID NO: 3055 - DNA, 105 bp, synthetic construct
  source 1..105: mol_type = other DNA
ataatttattcttttatatgcgaaaatatgggtatttctctatatttatagaaataaatattagagaatacccatattattttatagaggtattcctttttttcg

SEQ ID NO: 3056 - DNA, 104 bp, synthetic construct
  source 1..104: mol_type = other DNA
ccatttcggtgttgccctgtttcgtgaactcagttagagtgtatcacgcagcgggcaatgatgcacgctataaccgggtagaaaatcctatgaccaagacctcc

SEQ ID NO: 3057 - DNA, 107 bp, synthetic construct
  source 1..107: mol_type = other DNA
gaaggaattaaaaaatatggcaagctaaaactggttgtgcgtaacatgagtcattaactcatgttacgcacaccttcttgcagtccattaaaatatgaataaaattt

SEQ ID NO: 3058 - DNA, 102 bp, synthetic construct
  source 1..102: mol_type = other DNA
gcacgcaaatgtgctatgaggatttgcgttacgataatgcagctttttctatactttaggctgcaatcctgtagactagccccattaaggtttaggccagcg

SEQ ID NO: 3059 - DNA, 102 bp, synthetic construct
  source 1..102: mol_type = other DNA
atggctgctcgcatatgatctcctttaaacacttattattccgcttttggtggcaaaaatacaattataagtgcagatcatacgcgaacctgaattcagctg

SEQ ID NO: 3060 - DNA, 108 bp, synthetic construct
  source 1..108: mol_type = other DNA
caccccgactcctcaataatccaagtaaactacgagtggggtttaaattccataccgtaaatggtaactttaaccccacttcttaaatcttaggactaaggcaatgaa

SEQ ID NO: 3061 - DNA, 102 bp, synthetic construct
  source 1..102: mol_type = other DNA
atacgccgctttctggcacttgattttatttccttgacatcaatactaccgtttccacatggcacgataccttctgattgatgtcaggtattctgcccgttc

SEQ ID NO: 3062 - DNA, 102 bp, synthetic construct
  source 1..102: mol_type = other DNA
tattgctgattcccatgtttttaagtttacctagtaaaaaacacaacaccggagtgttctatttttaactaggtaaaaacctaagttgtttacgatagtaag

SEQ ID NO: 3063 - DNA, 112 bp, synthetic construct
  source 1..112: mol_type = other DNA
ccttcttgtgcatattgcttttctttttttagttttggagtatcattaggtgccagttgattttgaaatgctaaactgagtgcatttgttggctgacacgatggatactcac

SEQ ID NO: 3064 - DNA, 103 bp, synthetic construct
  source 1..103: mol_type = other DNA
atgcattgatttataatactttgttttatcgcaaatgttttaaattaaataaataaagcataaaacatttgcgattaaatatttgtctatatatatttgtgaa

SEQ ID NO: 3065 - DNA, 110 bp, synthetic construct
  source 1..110: mol_type = other DNA
gtcatttttaagaggaggctcctttctatgataggatcaataaaaatgttcgtacctaccaagcatctaataatatgtataaaaaaagagattgcttctaagaagcaatc

SEQ ID NO: 3066 - DNA, 117 bp, synthetic construct
  source 1..117: mol_type = other DNA
tccttcactaatcatacaaaatgatcacaggagaaagtatgtcattatacgcaacgcttgaagaagcacaacaatcttttacatactattaaaacagatagttagtactcaatagtc

SEQ ID NO: 3067 - DNA, 111 bp, synthetic construct
  source 1..111: mol_type = other DNA
tgggtccgaacgtatgcccgtacccatatgtgtgcaacagaatatcaggtctggccctattattctgttacacagtcatgatcgaggccgtgaaactgggccccgccgtcc

SEQ ID NO: 3068 - DNA, 108 bp, synthetic construct
  source 1..108: mol_type = other DNA
gtattaacccaaacaagaaactgtaagtgttactatagaataatcacatttcgatgtgccgcatctgtagtaacctcttatttgccatgctaccatcccttatagatt

SEQ ID NO: 3069 - DNA, 102 bp, synthetic construct
  source 1..102: mol_type = other DNA
ccttgattttactgggtttcttctaacttgtcccaattataactcaagcacctgcatctgtcaagactgggacaaaaaaaaattttatttttttctgtacat

SEQ ID NO: 3070 - DNA, 105 bp, synthetic construct
  source 1..105: mol_type = other DNA
cataacaacccatagacacgactttcattatatttgatagcagatacttctattcagagaagtttacactatcaaataattaaaaaggctgattctgcaacgttt

SEQ ID NO: 3071 - DNA, 103 bp, synthetic construct
  source 1..103: mol_type = other DNA
gccggccacgcccctcctcgacgtcagtacaacccctgtggaactatcgccccagcaaacgtcacccacggatgagccacacagggagccaacgttgtcacag

SEQ ID NO: 3072 - DNA, 106 bp, synthetic construct
  source 1..106: mol_type = other DNA
gggcttcatgccccgagtgtgccggactaatggtgtctctgtccgggattcgggaaccccaatataagtctgtgacgcctctaagttgatcgcaccttgagggctt

SEQ ID NO: 3073 - DNA, 103 bp, synthetic construct
  source 1..103: mol_type = other DNA
ccatgacacagaagcgtcgaaggcaaacatgcccaattgcaactgttgtggtgccgaaagtatggttatgccatgtctactaaacgcttccgcgcagccgtct

SEQ ID NO: 3074 - DNA, 103 bp, synthetic construct
  source 1..103: mol_type = other DNA
tcactccatgcttcgtttttaaagatgggaattgactataactatagcaggttgtagccttttccattaaaagtataatcatgtttccgcaaagggagatgga

SEQ ID NO: 3075 - DNA, 111 bp, synthetic construct
  source 1..111: mol_type = other DNA
aagagtgttctaaaatagaagaaaataaaaacacacatataaagacgcacgtagatacgtgaggtccaatccacttgtttatttttttatttttattttccatcaaaattt

SEQ ID NO: 3076 - DNA, 112 bp, synthetic construct
  source 1..112: mol_type = other DNA
ttagaagtgctgatattactgaactaatccaccattttgtgtgggcttttatggtgcgaaagtacgcactaatcttaaccacacatacttagagcactatttatattgatta

SEQ ID NO: 3077 - DNA, 102 bp, synthetic construct
  source 1..102: mol_type = other DNA
acccgctgagctgggggtatcctcagaactgctagttgtgagtgttcggatctccgaacactccttagatcacgttctgaggagtgcccccagtggcagcaa

SEQ ID NO: 3078 - DNA, 110 bp, synthetic construct
  source 1..110: mol_type = other DNA
gtcttgctacagaaaaagctgagcaattcagaacaccctataaaaaaaatcatatgtatgtgtttttttataagtggtcattgtgttataatgacttcgctaacataact

SEQ ID NO: 3079 - DNA, 102 bp, synthetic construct
  source 1..102: mol_type = other DNA
gcggttttctaatcttcttattttccttttgtgtataaatacatgatgcggtggcctcatgttcatatacacaaaccccggaaagccgcataaacactgaac

SEQ ID NO: 3080 - DNA, 102 bp, synthetic construct
  source 1..102: mol_type = other DNA
tacataaacatctttcgagacgttttaagagaaaaaattatataatctctatcctaatgatacaattccgaaacgaataacatgtcaatgaatgtttatgta

SEQ ID NO: 3081 - DNA, 105 bp, synthetic construct
  source 1..105: mol_type = other DNA
attttgagttaagataagaaataatttaatgggttacttgtcagtggcgtggttccccatacataccgtaagtaatccattaataatcgtgatattttctacatc

SEQ ID NO: 3082 - DNA, 108 bp, synthetic construct
  source 1..108: mol_type = other DNA
tttgttttaaagcaaacaagacgctacttactttacctacattcttaccgtcgccacccccgaagtcgtagaatgtaggcaggtattaactaatcttttatttattaa

SEQ ID NO: 3083 - DNA, 105 bp, synthetic construct
  source 1..105: mol_type = other DNA
aggggagtttgattaaaggccgctaagaattgagtgcaaagtagcagcacttcttcacattctggcacaatccacccatctagcagggagggtgcattgtgtctg

SEQ ID NO: 3084 - DNA, 102 bp, synthetic construct
  source 1..102: mol_type = other DNA
gctgatcagaatccattctgatcactcatcataattacgcagatacttgccagcataagtccgcgatgttatgatccggtctttcgttgtctagccggggtt

SEQ ID NO: 3085 - DNA, 110 bp, synthetic construct
  source 1..110: mol_type = other DNA
gagatatttaccgatacagagacgttagcccgccaaactgacaagagttaccttgatgaagatcaaagagacacttgtcaatttcacctctttcacggtatacctttcga

SEQ ID NO: 3086 - DNA, 111 bp, synthetic construct
  source 1..111: mol_type = other DNA
tgttgaaaggggcttaactcgaagctccctttaacgtcatcaatattacgcactccacatgactaaagtgctcaataatgtcaaaggaagagacgtgctaccaactgtata

SEQ ID NO: 3087 - DNA, 102 bp, synthetic construct
  source 1..102: mol_type = other DNA
ggcatctcgggtggctctgagttttcctcggagaaatataccaccggattatgatcgggtaaacggttctccgtgtgaatggatcaaggtctccaaacgggc

SEQ ID NO: 3088 - DNA, 116 bp, synthetic construct
  source 1..116: mol_type = other DNA
ttcaaaagtacactgaacttctagacaaatagttttctagaacagtgtcttgatagaagttgttgtaaataatgatttgtctaaacgttcatagactatgattattcccatagcag

SEQ ID NO: 3089 - DNA, 103 bp, synthetic construct
  source 1..103: mol_type = other DNA
tcccaggtcagaagcggttttcgggagtagtgccccaactggggtaacctttgagttctctcagttgggggcgtagggtcgccgacatgacacaaggggttgt

SEQ ID NO: 3090 - DNA, 102 bp, synthetic construct
  source 1..102: mol_type = other DNA
gaacggcaaaattttttacacttctattacttctttatcgcacattagcaaatgctcatgtacggtaaagaagcaagcaaccgaaaacaatagatagaccgc

SEQ ID NO: 3091 - DNA, 113 bp, synthetic construct
  source 1..113: mol_type = other DNA
gggccctccgttttgcgttcacgggtcgcgtaggttagtacttagtgctacagcggaccgccgatggtgcactatgtaccaaccaagcgggccggtagcctccgaaccatggg

SEQ ID NO: 3092 - DNA, 102 bp, synthetic construct
  source 1..102: mol_type = other DNA
tttatcatattcatatctttatgtcaagtttctataagttgacacctagatgtgttgtgctcctcttatagaacctaaattatctaaaataaaattcaactc

SEQ ID NO: 3093 - DNA, 104 bp, synthetic construct
  source 1..104: mol_type = other DNA
gccacactgggagaatgcaggcaagaagcaggtagatcaacgacttgtaaccaagcacatatgttgctaaactacctgctatggcgaaagcgaaaactgctggt

SEQ ID NO: 3094 - DNA, 111 bp, synthetic construct
  source 1..111: mol_type = other DNA
cgaccgtggacgtaaccgttgcgagaagtactgccctttactaagcaactaggcaactggtagcttgttaaatggcagcactaccgcataggagtgacaggtggaaaaaga

SEQ ID NO: 3095 - DNA, 102 bp, synthetic construct
  source 1..102: mol_type = other DNA
tctccttgatgctgtgctcatggctagggaacgtaagttgcacgacagccttggtcaagttcggactgacgcacccaaagctctaccggacgtttttgcagg

SEQ ID NO: 3096 - DNA, 106 bp, synthetic construct
  source 1..106: mol_type = other DNA
ggcagctaccctatttcagtttgttggttgatactgttttatgagtagctaccatcgaggcggcactcataagacagtattagaaatgttttcgggaaacggcgta

SEQ ID NO: 3097 - DNA, 104 bp, synthetic construct
  source 1..104: mol_type = other DNA
ctcctatttatcaagctttttcctctgtatccctattatatctcaagcccccacccttgtgtcaagtattggatacatatttttttcaaatttccaatccattt

SEQ ID NO: 3098 - DNA, 108 bp, synthetic construct
  source 1..108: mol_type = other DNA
cgctcgccggttgtcgccgtcgaagtgttcacatgtaagagcctacggtgttccccggtggtcctggacgtacaacacgcccggaagatttcgactcactgatgagcg

SEQ ID NO: 3099 - DNA, 105 bp, synthetic construct
  source 1..105: mol_type = other DNA
gtcgattgtagaggttaaatataactaatcgtgtgtgttttgtcatgtgtgggaaccctagtatgatagtttacacatgatatctattcttatcttcgaaaaatc

SEQ ID NO: 3100 - DNA, 108 bp, synthetic construct
  source 1..108: mol_type = other DNA
taagttcaagaacttctaagatttgattgtattagaataaccttattactaaggttctttaccgaatctaatataatagatatactgggttaccagctttcatactgg

SEQ ID NO: 3101 - DNA, 107 bp, synthetic construct
  source 1..107: mol_type = other DNA
taaactgtctatttatcacgcatttcaattcttcttttcttctactaacggacatccgaaagtagaaataaagaagaattcctttttatctttttttaatttcattt

SEQ ID NO: 3102 - DNA, 102 bp, synthetic construct
  source 1..102: mol_type = other DNA
ctacgctacaagcgtcaacttcttattggcgctgttcgcggatggcagcctgtgctgccatcggtacatagcgccaaccatttcatatccacacgctcacat

SEQ ID NO: 3103 - DNA, 108 bp, synthetic construct
  source 1..108: mol_type = other DNA
agtactataatgactctatgaccagattataaggggtgttttaggaagtgaaaatcataatcttcactttcttatgcaccctgtggatttatacatataaagagatta

SEQ ID NO: 3104 - DNA, 102 bp, synthetic construct
  source 1..102: mol_type = other DNA
tctgaaattctcatgttttgtctctttgagttatatcacattcgaattacatcactgtataattcgctttagttcaatctcaataacttaaaaccctgactt

SEQ ID NO: 3105 - DNA, 100 bp, synthetic construct
  source 1..100: mol_type = other DNA
atgttcctgatacaaaaataattatttcttgtgggttctgcaaatgatatgtattgatttaacacttgcagaacctacatgtttataatacagattatca

SEQ ID NO: 3106 - DNA, 105 bp, synthetic construct
  source 1..105: mol_type = other DNA
atatattatatataataaaattaaaagcatatatcagttttggaacgagcggagatgctcactttacaaatctgataatagaggttaaataaattcaacctctat

SEQ ID NO: 3107 - DNA, 103 bp, synthetic construct
  source 1..103: mol_type = other DNA
ttaattatgttgggggttaattggttttggtatatgtaaatgcacttaatccattaaaagcatctatagacaccactcttgaaatgttggtattattggtttt

SEQ ID NO: 3108 - DNA, 103 bp, synthetic construct
  source 1..103: mol_type = other DNA
tagctgcattaaatcacctaactctcccgaaggaaattgttttttattagcaagccaataaatattaaatttcttctggaatctattatcatctaatcactgt

SEQ ID NO: 3109 - DNA, 102 bp, synthetic construct
  source 1..102: mol_type = other DNA
cctttttgtttgtttattgaatactagttttctactttataaagttaactgtgataaactttttgaaatagacaactgtgttatagtttgttgctattgcag

SEQ ID NO: 3110 - DNA, 107 bp, synthetic construct
  source 1..107: mol_type = other DNA
catggcgggcatatttgcacgtcagagccacttagggaagtgtgcaacttgccgaggacagttgtacactccctaaagtggctctgacctgcgtaaacaccagatcg

SEQ ID NO: 3111 - DNA, 103 bp, synthetic construct
  source 1..103: mol_type = other DNA
atttaatcaattggttcaattaattgtgtttatcctacataaactttgtccaggcaaagtttatgtaggataaacacaattaatagtcacaaatcataaatca

SEQ ID NO: 3112 - DNA, 107 bp, synthetic construct
  source 1..107: mol_type = other DNA
cataattattatatatttaatctgttcagttcgagttaattagccataaaggcaccatttgatttttgtaaaaaaatgtcaaacggactgtatagattaataaaata

SEQ ID NO: 3113 - DNA, 107 bp, synthetic construct
  source 1..107: mol_type = other DNA
ttttgtgccaattcttcattttttagtagtatcattttacagcgaatgagctgattgatataagatactaccaaaaaaccgaatttatgactcaaaacaacaaaaaa

SEQ ID NO: 3114 - DNA, 104 bp, synthetic construct
  source 1..104: mol_type = other DNA
cgctggtcagggcggcattcgtcataatagggccataatagcgggtttattggttatttgtcgtttatagccctattagatcgtggctgctcagcgccctatcc

SEQ ID NO: 3115 - DNA, 107 bp, synthetic construct
  source 1..107: mol_type = other DNA
agacgtatatttaattttttgccccgtgatgtgtgcttgaaaatgcataaccaatgtagtataatttgaagcacacaacatgtgtgcttcttctttttgttgttaca

SEQ ID NO: 3116 - DNA, 104 bp, synthetic construct
  source 1..104: mol_type = other DNA
taaagggcttcacgcataagtacaaataatgtaacaacctgtactgtatgtgctatcagtacaggttgttacaccgttaggcaaaaaaataaatgtccatagtt

SEQ ID NO: 3117 - DNA, 101 bp, synthetic construct
  source 1..101: mol_type = other DNA
atgtaagagtaggcgtcaatcattttgacaattatggtgcaacctgcactcaggttgcaacataattgtcaaaatgattgatgaaactggatgttgcttgc

SEQ ID NO: 3118 - DNA, 112 bp, synthetic construct
  source 1..112: mol_type = other DNA
catcggcggtgcgcagtgcgtcgagcacctccagcaaggcagactggtccagggccatcgcgtgagtctctgtggtgaaacgaccaagaatcactaccgagaggaacatcgc

SEQ ID NO: 3119 - DNA, 108 bp, synthetic construct
  source 1..108: mol_type = other DNA
tagggatttagaggcctttaatacacaatcgttatagtaaacctttggggaacgcgataggttcacagtaacaaagttagaagttaatcacagcaagaagcctaaatt

SEQ ID NO: 3120 - DNA, 116 bp, synthetic construct
  source 1..116: mol_type = other DNA
taaaatcaaggagccctgaattgattgggtcaaatttatagactgtttacccatggataagatcaaggctaaacagtctataaaaaaataatcatgaaaatttccaagtgattttc

SEQ ID NO: 3121 - DNA, 102 bp, synthetic construct
  source 1..102: mol_type = other DNA
gcgcaaaaaggccgcataaggcggtattcgtgctttatcgctagtgaacattatctgggtagcgataaagaagtatttagtaaactaacaacatcctatata

SEQ ID NO: 3122 - DNA, 105 bp, synthetic construct
  source 1..105: mol_type = other DNA
ggaagagatgtacatcacaaaaatagttatgtctttaagaaaacataactaaggtattgtatcggttatgacataactctagaatccgcccttgttatttaggag

SEQ ID NO: 3123 - DNA, 103 bp, synthetic construct
  source 1..103: mol_type = other DNA
tctataggtttgtataaatgtaatattttaggtatatgattttgtttattagtgtaaataacactatgtacctaaaatttatatttaataattacctcatcat

SEQ ID NO: 3124 - DNA, 109 bp, synthetic construct
  source 1..109: mol_type = other DNA
gtgtgatgccacgtctttgctcctgtattgtgctacttagagcataaggcgaccatgccttacaagctcaaaatagcacacgtttccgcaggtcagcggcctgcggtag

SEQ ID NO: 3125 - DNA, 115 bp, synthetic construct
  source 1..115: mol_type = other DNA
agtgggcaaagaaaaaacaccgtcgtcctgtcgtgggctgtggtacgtttgggtgtcagatgaattacctaaacacgaaataagacattagtgatttcaatgtattcgctaatgt

SEQ ID NO: 3126 - DNA, 105 bp, synthetic construct
  source 1..105: mol_type = other DNA
gaagcaaatgtttttattcaaattttcgtaaaggtaaatgctacctactgttacgctatttggcaatatttacccttgaaataaataacattgaaagtagaacca

SEQ ID NO: 3127 - DNA, 150 bp, synthetic construct
  source 1..150: mol_type = other DNA
tactggcgcatcgggtatctgatttcagatacttggatgcaggtacgccttgatgcggggtagagcagtctggcagctcgccgggcccataacccggaggtcgcaggttcaaatcctgcccccgctattcggacagatacatttgacatt

SEQ ID NO: 3128 - DNA, 108 bp, synthetic construct
  source 1..108: mol_type = other DNA
tgaaaataatacttaaaattataagcagagttaggagatgttacatatacacaccatgtggtatatatatgaaaagactctaccttgatctttaattaaataatcaag

SEQ ID NO: 3129 - DNA, 110 bp, synthetic construct
  source 1..110: mol_type = other DNA
aaaagtccggcaggtacccactgccggacggatattgtatcatcatttatgtgccaatgtgtaggtacataaaggctacctacacttacttttgctggattttcggataa

SEQ ID NO: 3130 - DNA, 105 bp, synthetic construct
  source 1..105: mol_type = other DNA
gcactcccataacggctattaaataataatctagttgaagctcgacctttaccatgatagagtcccaactagatattttggggggaataaatggctgagagcaga

SEQ ID NO: 3131 - DNA, 102 bp, synthetic construct
  source 1..102: mol_type = other DNA
gccgttcagaatgaacctacgcggcttgctgtgtcctaacgtagtcgccactaggtagaaatgtcaagacacagcaagcgcgatacaatggggtatgcccaa

SEQ ID NO: 3132 - DNA, 102 bp, synthetic construct
  source 1..102: mol_type = other DNA
cgaatagagttcttgaaaaattatttgttgtcccatattgacatcaaccgtgtgagtgatatataatagggacaacacgggaaagccttgattttacaaggg

SEQ ID NO: 3133 - DNA, 108 bp, synthetic construct
  source 1..108: mol_type = other DNA
gctacataatttttagccttttcttatttactttatacgcactcgcagaatggatgaccttactgtaagtgcgtattaagaaaaatagccaggaaatccctgactatt

SEQ ID NO: 3134 - DNA, 115 bp, synthetic construct
  source 1..115: mol_type = other DNA
tgccgctttccgcgcaactcgctgtcctgaaacgacaatcaacggtcggacagggggcgctgcccgaccgttagttgtcgcgccaacatacatttgttcgaatatatagggatct

SEQ ID NO: 3135 - DNA, 110 bp, synthetic construct
  source 1..110: mol_type = other DNA
aacgttgatatcatcgaatttttaccttagtatctataagtgcatttgtttcatcaattgaacttatagataactattgatataattaccttataaccttaattgttgat

SEQ ID NO: 3136 - DNA, 103 bp, synthetic construct
  source 1..103: mol_type = other DNA
ggtggtgattagttatctgttattttggactgctgggtgggatgtgttataatatccacacctcactgagcagtccaatctgtaaagtagtggagcgagctgt

SEQ ID NO: 3137 - DNA, 102 bp, synthetic construct
  source 1..102: mol_type = other DNA
tgacaccgccccctgatagattttcaaatcataatactgtgcctatcatagcaaagaaatctgcagcttggggaattggtagaattgaggacaggtgcagca

SEQ ID NO: 3138 - DNA, 102 bp, synthetic construct
  source 1..102: mol_type = other DNA
gaccttgagaagtccggaaatcgcatgtctcattaatccacctcatcatccaaatgttgaggcaaattaatttctaggctatgtatgcaccaagatgaggtg

SEQ ID NO: 3139 - DNA, 102 bp, synthetic construct
  source 1..102: mol_type = other DNA
gggtttgtaaaatcaaccataattgtacaaactaataataaccgtcaccatctggtgagttgaacttatggaaaatccttataaaggagacagtgaacaaac

SEQ ID NO: 3140 - DNA, 108 bp, synthetic construct
  source 1..108: mol_type = other DNA
cctgctatccgaaaattcccaatgtataaatgacctgtattcctgatgtacgtatgtgcaggtacgcttaaggtacaggtgattttgcatatactagtataccagatt

SEQ ID NO: 3141 - DNA, 108 bp, synthetic construct
  source 1..108: mol_type = other DNA
tttaacctcctttcttgagggtgcgcgctccctttatccttattgtaaattaccattcgggttttgtcaataaggaacaagaaaaaagtatcttgcttttaagcggtt

SEQ ID NO: 3142 - DNA, 105 bp, synthetic construct
  source 1..105: mol_type = other DNA
taaaacggctcaaaacaggggaaatggtagttttgagttatggggtgtggtataaataccagccccgataactcaactactgaaataacgaataaatcaataaat

SEQ ID NO: 3143 - DNA, 104 bp, synthetic construct
  source 1..104: mol_type = other DNA
gtggcggtttttgttttgtgtaatctcaaaagttacatatgacttgcattagtggataggtcattttatacttctgacaaatcactatgttagaaggatcttaa

SEQ ID NO: 3144 - DNA, 105 bp, synthetic construct
  source 1..105: mol_type = other DNA
gcacccgctttttcttgaaaaattatcacatataacttatttggctataagtataaaaccatataagccccctgcaatgactataattgctcgccgtccgtttcg

SEQ ID NO: 3145 - DNA, 102 bp, synthetic construct
  source 1..102: mol_type = other DNA
ggcggccgagccgcgtgcccggagactgtgcgccggggcgggcctcagaggccctcgacacccgcggcctgcagtcgctggcgcagcgcctgcacctcggga

SEQ ID NO: 3146 - DNA, 106 bp, synthetic construct
  source 1..106: mol_type = other DNA
aatcagcgggcccgagaggggccaccttgaatcatcacgaacgcggagctaccttggttctcccgagttagggacataacttgggagacctgggggtgtctatgaa

SEQ ID NO: 3147 - DNA, 114 bp, synthetic construct
  source 1..114: mol_type = other DNA
taatatcaatcgcataacgtcaaaacgcccgtatgggtttaaaaatatattccatcaagatcgaagtaccatttacacccatactgccaaagttctaaggtggtcgccagaaca

SEQ ID NO: 3148 - DNA, 105 bp, synthetic construct
  source 1..105: mol_type = other DNA
tttaaattacataacaataacctcttttttgtcataagcttgacatgagaggggtttcgtgtcataatagtgatagaggcaaatagttatgtaaatacaaggagt

SEQ ID NO: 3149 - DNA, 102 bp, synthetic construct
  source 1..102: mol_type = other DNA
catcagtgatgatcctcaatccaattatgtgagaatatcacctaccgttcgagaacggaagtctataactcacatattttgacgttaccttcagcatctgat

SEQ ID NO: 3150 - DNA, 104 bp, synthetic construct
  source 1..104: mol_type = other DNA
catggccgtctcaatcattaaaaactgagataccaatatagcaaaaagtagggagcaggtatagcggttgtaggaacctcactcgcccgcttagaacaccgcac

SEQ ID NO: 3151 - DNA, 102 bp, synthetic construct
  source 1..102: mol_type = other DNA
tctttgatttatcagcgttttaagcacctgtcattattatgacacaatccccctcttatgtcaagtaactgacactattttgtctccttttatatttcagtt

SEQ ID NO: 3152 - DNA, 111 bp, synthetic construct
  source 1..111: mol_type = other DNA
catggtgtctggccggatgggatctgaccaccggtttacagattgactgagacgagtggatcagtcaacatgggttcagcgaccccatcgcagagcccacggctggtgacg

SEQ ID NO: 3153 - DNA, 109 bp, synthetic construct
  source 1..109: mol_type = other DNA
tatggctcttttttcatgcaaacctttgttgtacccaatcaataccgcttacgacagatatcgtttgggtacaacaatggacacaccttaattataatagacttttaca

SEQ ID NO: 3154 - DNA, 102 bp, synthetic construct
  source 1..102: mol_type = other DNA
gttccatgagaagagtatatcacattgattgcatttaagcttctgtttgtttataaacaatttattaattgcaacaaaaagaaaaagccctatttgactagg

SEQ ID NO: 3155 - DNA, 108 bp, synthetic construct
  source 1..108: mol_type = other DNA
tgaatcggtcttgagcctgattttgtttggtatgtgtatcgggtcgtcaagcgaacgcatgacaccccattcgcacatacgactaaacgttaaactcaatgtcgactc

SEQ ID NO: 3156 - DNA, 120 bp, synthetic construct
  source 1..120: mol_type = other DNA
agtaaacctatatttttgtcaataggctattcttagtggggcttaagtcaacttgtcattggtgtcatgttttcttaagcctcaaaataaaaacccttactgagtaagggtttagttaaa

SEQ ID NO: 3157 - DNA, 113 bp, synthetic construct
  source 1..113: mol_type = other DNA
ggttgttcgaatgatattttgtagcatgtataaatttagatgtatctcaaactttagtcgtgataaactccagtgaagcatcaaaggtattggggcgggcttttagatgagaa

SEQ ID NO: 3158 - DNA, 103 bp, synthetic construct
  source 1..103: mol_type = other DNA
tcacgactataaaactacaatcgagtttagtttaataggagctaccgttcgagaacggtaaggggtatagtatgaacttcaaacacgacaggttcagaggttc

SEQ ID NO: 3159 - DNA, 103 bp, synthetic construct
  source 1..103: mol_type = other DNA
tgagtattacgtcgaattttaccaatatagtgttagaataaacactttactaaagtactttggcgaaactaacatacttttaattatgtgtttattatccaaa

SEQ ID NO: 3160 - DNA, 118 bp, synthetic construct
  source 1..118: mol_type = other DNA
atggaatttttgagcgaaaaagctctggatgacccgttgggttattttcgtccggccaggtagggtagcacaaaccaaagaaaaaaataaacgcacgatcccccccgaaaaacagcag

SEQ ID NO: 3161 - DNA, 110 bp, synthetic construct
  source 1..110: mol_type = other DNA
cctccgctaaaaatgcggattaaaaacatccccattagtaaacgtctacagaccgccatagacgtttgctaatggggtatttattttgccgcagaggggcttttttcaac

SEQ ID NO: 3162 - DNA, 145 bp, synthetic construct
  source 1..145: mol_type = other DNA
accagaaaatatcggacagaatagctctagaagccctgcaaaatagggccgagcgggtgaagggaatcgaaccctcgtattcagcttgggaagcttgatctatcgcctatttatcaataccttagtcgtaaaaactgaccatatc

SEQ ID NO: 3163 - DNA, 108 bp, synthetic construct
  source 1..108: mol_type = other DNA
ccatgatgctccgatctggtcccgtcattgtataataggcaactcctaatcagctcggggttgcttattgtacaacgatgctggagtccatcgtgaaggacgttgcac

SEQ ID NO: 3164 - DNA, 108 bp, synthetic construct
  source 1..108: mol_type = other DNA
gtcccggatgggacgagctgattgcgttggacagtcctactagtacccccgtggtcacgggttgtcaagttagactatcccaatggacgccgtgatttactgccgaat

SEQ ID NO: 3165 - DNA, 108 bp, synthetic construct
  source 1..108: mol_type = other DNA
gaattaaatcatgtataacgagcttacgaaaaccgtatctctatatacgttaggttgtggagtagtaaacaataatatgattgcgtaggaacctagtaatatcaacgt

SEQ ID NO: 3166 - DNA, 102 bp, synthetic construct
  source 1..102: mol_type = other DNA
cttggaggcatccgtctctatagttgtgggttacattacgttgcttactgtccgtttggttggtaatgtaacttgcactaagagcgaacctgtgcaataatc

SEQ ID NO: 3167 - DNA, 107 bp, synthetic construct
  source 1..107: mol_type = other DNA
tatcgcacgtcacattagaggcgttatcgtgcgcgcctatttgtgagtaggcatgaagctcttgtatcgtcaatagcatcagttggcgatcaggagttagaacatga

SEQ ID NO: 3168 - DNA, 103 bp, synthetic construct
  source 1..103: mol_type = other DNA
agcctttatttatgcgggttttctgaaataatcccataagaacatctgcaccactcaagatgttcttataggatttcattttctataagaacatctttttttg

SEQ ID NO: 3169 - DNA, 104 bp, synthetic construct
  source 1..104: mol_type = other DNA
tacacaaagatatgaaaaaatgtcgttacgctataaaaatgcgttgaaaatttcgattatttaatagtttttgatgcgtaacgataaaacagaaactttgaaaa

SEQ ID NO: 3170 - DNA, 109 bp, synthetic construct
  source 1..109: mol_type = other DNA
agtgatacaatgagaataatagaaaataataattgtatcaatttagaatatcatacagatgtatgatagtctaaattgctatttatatatgctataatatcatatgaat

SEQ ID NO: 3171 - DNA, 102 bp, synthetic construct
  source 1..102: mol_type = other DNA
tgtcaccgttgaatacaattaattttcttatgcactttgtattcattggtgaaccgaacaatacaaagtgtacataaaaagagaccctcgttttgagggtct

SEQ ID NO: 3172 - DNA, 103 bp, synthetic construct
  source 1..103: mol_type = other DNA
cgcgtcgggctgatcggcataccctagagtgtacttcgcgtagtcgcatacacaagcgactcgccgtagaacccttctatcgagaggcccgacgtgataccag

SEQ ID NO: 3173 - DNA, 121 bp, synthetic construct
  source 1..121: mol_type = other DNA
gaaatttataaatcaatatctaaaacttagtaaactactatttgtcagaaggaaaccattgtatggtcatattatgaagtccactcctttcataccaaggttttaaaggccttgatttata

SEQ ID NO: 3174 - DNA, 102 bp, synthetic construct
  source 1..102: mol_type = other DNA
aggttttatactttcctaataattattttaataggtttgcatatatcaccctaggtagaactatctaacctaccaaaagggtatattgtaaccagacaggaa

SEQ ID NO: 3175 - DNA, 113 bp, synthetic construct
  source 1..113: mol_type = other DNA
aacaccaacataatatactgtttatgatttaggataatatcgacttttaataaccaacgcaaatactttagttactaaatgtcgaaaataggaagtaaacgtgaaaagactcg

SEQ ID NO: 3176 - DNA, 105 bp, synthetic construct
  source 1..105: mol_type = other DNA
aatccaatggtgaatgacagaactcttacttgcgggggttcttgatagcagcctgcgccgtacataccttgtgtatataacgatgtacattttgaattagagctg

SEQ ID NO: 3177 - DNA, 102 bp, synthetic construct
  source 1..102: mol_type = other DNA
acataaccgcattttaattgatagttggttttcttattattcatggagccaccggaccaatcataataagaaaacggctatatacacactatttcaataaaa

SEQ ID NO: 3178 - DNA, 108 bp, synthetic construct
  source 1..108: mol_type = other DNA
ctccccaggtcggaacacctttcggagactacggtacttcacaaatcagttgacaccaaatgatttgttaagtgccgtagctaccaatggcaagacgcatacccaact

SEQ ID NO: 3179 - DNA, 117 bp, synthetic construct
  source 1..117: mol_type = other DNA
atcaaaatcaaaaccttgtttttattgaataatttataataatcaatattcagatccaaaacatcgaataaattctttcaacgtctaccaaaatacacaagcccatgttaaatgggc

SEQ ID NO: 3180 - DNA, 102 bp, synthetic construct
  source 1..102: mol_type = other DNA
actaactctcgataagcctataaaacatgtagtctatcatacaatttactttagtcaactatatgatagacgacattaaaaatagtttagcactgctcttaa

SEQ ID NO: 3181 - DNA, 105 bp, synthetic construct
  source 1..105: mol_type = other DNA
agggttatccccagctttgacgcgtagaagtgtcatttggctgtgacagtggccaccgtcgcaggaaacgagcataattagatgaatggcacaggaaaaggtacg

SEQ ID NO: 3182 - DNA, 109 bp, synthetic construct
  source 1..109: mol_type = other DNA
ctattaaattcaaattgttttatcctgcatactgtctactttgaaatctaccttctggttgatataaaaatagacagttttaatttttatttttggctaatctaatatt

SEQ ID NO: 3183 - DNA, 106 bp, synthetic construct
  source 1..106: mol_type = other DNA
tattacgctgatttacagctgattatttaatcaataatgtttttagtttaatcaattaaactaataacttttatgattaaatttaaagtgctatatttgtgctgaa

SEQ ID NO: 3184 - DNA, 114 bp, synthetic construct
  source 1..114: mol_type = other DNA
gctcctgggcttttcagcacctcgctggaaatatttacatctggtctccaatgaacatcgcatcccgtatgcttacgggagaccagatttccgccccggtaacacttttttcaa

SEQ ID NO: 3185 - DNA, 103 bp, synthetic construct
  source 1..103: mol_type = other DNA
ttaccatttcacgcctacaagaaaattgggggttatagtaagtaagaaagtaacatcttttacatactagaaccacaaagagctaacaatgcttaagatatct

SEQ ID NO: 3186 - DNA, 103 bp, synthetic construct
  source 1..103: mol_type = other DNA
gagacattgtaatttcatctatttattagatgtctaaacagtgcattactactctacaacctatattagacatcttataaaaagtatatctaaaccttatcta

SEQ ID NO: 3187 - DNA, 103 bp, synthetic construct
  source 1..103: mol_type = other DNA
tcggcatagccgtgagcgtagcgtgacgtacggctccgtgtgctcttttcggatgagaagtgcatgcgcagccgtacaccacctcgagcccagcccgcgtgga

SEQ ID NO: 3188 - DNA, 108 bp, synthetic construct
  source 1..108: mol_type = other DNA
agttttagtaggtaatttgaggggatatttttgggtaacaatcggttttcgcccaacccaaaacatatagttacccaatagcaattaaaccaatgaaataattaggta

SEQ ID NO: 3189 - DNA, 103 bp, synthetic construct
  source 1..103: mol_type = other DNA
gacatagcaattactcactgaatttatatatgcacacattatcattgagctcattaaatgtaaatatgtgcatatataaatagcaatatatttatcaagtagt

SEQ ID NO: 3190 - DNA, 105 bp, synthetic construct
  source 1..105: mol_type = other DNA
gataatcattcaatatcaatagattataaaaaattatattgttacttgaatcaagatgacggatacaatataattgcccacctatcgttgttaatgcaatataac

SEQ ID NO: 3191 - DNA, 109 bp, synthetic construct
  source 1..109: mol_type = other DNA
tgaaattatatgagttgtctgaatttgatgagcaatttcgataccgacgcacctatatcggaagcgattttgctcacactatttattcatatacaaaacagcgtgattt

SEQ ID NO: 3192 - DNA, 114 bp, synthetic construct
  source 1..114: mol_type = other DNA
attataggcaatatcaggcattttatttattcatccaaagatgatgactttacgggggtaaaatacacatctttgggcgtatttttaaatcattttttcaatatctgtttttag

SEQ ID NO: 3193 - DNA, 102 bp, synthetic construct
  source 1..102: mol_type = other DNA
acaggtggtctttctttcgttgatatggtatttctaagtataccttaccccagccaaaagtaattttagagataccttatgtaatgcggcattacagccgca

SEQ ID NO: 3194 - DNA, 102 bp, synthetic construct
  source 1..102: mol_type = other DNA
cgggcttttttgtgtaccctatcaaaattacgaccaatcaaagatacattataatgtaattgatattgcacaacccgtccaagccccgatagaatgccggtt

SEQ ID NO: 3195 - DNA, 105 bp, synthetic construct
  source 1..105: mol_type = other DNA
gacggcgctttttttgtcgtttcgtaaacctataacattttatgttttgacagcaataacttaaatgttagaggtttgaggtatagcaattttggggtggattgt

SEQ ID NO: 3196 - DNA, 105 bp, synthetic construct
  source 1..105: mol_type = other DNA
tagaaaaaaataagcatttattgaaattcctacttgacgaaatagtacccaagggcttaatatataaagtacagagaaacaaacgttgcttcacaacaaaggatg

SEQ ID NO: 3197 - DNA, 107 bp, synthetic construct
  source 1..107: mol_type = other DNA
tgttcatggacatcaggtgcgtctgccttccctctgccccttgaacttgatcgacgagccgaagatgctcaagggagatacccgttgcttgctctcccagtctaccg

SEQ ID NO: 3198 - DNA, 102 bp, synthetic construct
  source 1..102: mol_type = other DNA
agctaccctatatcaagtttgttatgatactgttttatgagtagctacctttagggcggcactcataaaacagcataagattgttttcgggaaacggcgtag

SEQ ID NO: 3199 - DNA, 112 bp, synthetic construct
  source 1..112: mol_type = other DNA
tatcgaattcaatttttaattatattatttaaggtttttagtcaaagctgttttaatatcttttactaaaaactttattattttattctttcttcctatataaataaaaaaa

SEQ ID NO: 3200 - DNA, 108 bp, synthetic construct
  source 1..108: mol_type = other DNA
gagtaatcaggacgaaaggctcaaaagtgtgtagaacacccctaccagttgagagcggggggtagtattctcacactttctaaagtgtgcaggaaccgccaaatgcct

SEQ ID NO: 3201 - DNA, 107 bp, synthetic construct
  source 1..107: mol_type = other DNA
taaggcatcgcctgtgctcctgggcctgtatgcttctaattatgccactattgaccattaggtacaaccattagaagcatagaaacgcacattattcttagggctta

SEQ ID NO: 3202 - DNA, 107 bp, synthetic construct
  source 1..107: mol_type = other DNA
tcgcggcagccccagttgcccgctcgaatagccgttctaggaatcgcgtcagcacgctggcgctagctctagaacggtatataatgcgggcttggaatcccctaaaa

SEQ ID NO: 3203 - DNA, 109 bp, synthetic construct
  source 1..109: mol_type = other DNA
atgcccgacgtcgcgcccggctccactttttcccaccttccaaacttaatcaccataaactttgacttaagtgaaacattcgacgtcgaacaatgttatcctgcccata

SEQ ID NO: 3204 - DNA, 108 bp, synthetic construct
  source 1..108: mol_type = other DNA
aatagataacactaccctcaatatcaatgcagttgaaacgtgttagcattattacaacgatactaacacgtttcaattcaaagagtattagaatgcccaatgaattga

SEQ ID NO: 3205 - DNA, 102 bp, synthetic construct
  source 1..102: mol_type = other DNA
tgtcaattaatgtcgaattatttttttaacccaaaaaatcgaatttgaggaaccttgtatcttggcaagagatacattttatataaatgagtataaatatga

SEQ ID NO: 3206 - DNA, 111 bp, synthetic construct
  source 1..111: mol_type = other DNA
tagtctacgcatatgattttctcttctccgaattaaacaatcaacagaaacatttgtcttttgtgaaataattcttgtaactgtaatcgcaaggtagttacgaatacgctt

SEQ ID NO: 3207 - DNA, 104 bp, synthetic construct
  source 1..104: mol_type = other DNA
gcccgctctgggtattgtgttgctgccatatctatcatggtggatataatgaacctgaaccaccatgatagatatcataaagacagagaatatcccccggcctt

SEQ ID NO: 3208 - DNA, 105 bp, synthetic construct
  source 1..105: mol_type = other DNA
cgagatatctcgaaaattcgaataagatttatatgtatcataaataaacttatgagtaaggctattaatgatatgtataaagcccgaggaacaacctcgggcttt

SEQ ID NO: 3209 - DNA, 113 bp, synthetic construct
  source 1..113: mol_type = other DNA
cctgagatgccgccagttaggattcgacggacgagaacctgattcatcatccggcctcgaccagttgtcgaaacagtttccggtagattgcgggacatgcgagcggtcatata

SEQ ID NO: 3210 - DNA, 102 bp, synthetic construct
  source 1..102: mol_type = other DNA
taaatcagtaaaaaaagagtttgaatagcgtcctgtcaagttcacacacaactgaaggagacaactatttgatagttgtctctttttttacacataaaagtc

SEQ ID NO: 3211 - DNA, 110 bp, synthetic construct
  source 1..110: mol_type = other DNA
cacaaggggtttcaggtccgagatccaaatgtctgtcctgttctagtcgatgacggtcgaatagacttaaaagtcaagtagtaaccgtttactcgtttagagcgctggta

SEQ ID NO: 3212 - DNA, 120 bp, synthetic construct
  source 1..120: mol_type = other DNA
tttttctgtatctacgatcggtacatgccctcacgagattttaaggactggcgcaacccgcgggtcgtttgctacacttcttaaaatgagtaatcccagcttacgggctatttgtggtgc

SEQ ID NO: 3213 - DNA, 112 bp, synthetic construct
  source 1..112: mol_type = other DNA
acgggcccgctccacaagctcgttgtccatgggcttaggttacttttgccgaaacgctggagtcaacggttcgccggaggtaccacaatggagcctgcacccgatgcgcagg

SEQ ID NO: 3214 - DNA, 103 bp, synthetic construct
  source 1..103: mol_type = other DNA
atagatacagtgttttagcggataatcaaatttttagtgtgtttttctgttaaaaacttactaaatttctgattatcttttcataagttggtagatgccgata

SEQ ID NO: 3215 - DNA, 103 bp, synthetic construct
  source 1..103: mol_type = other DNA
aaccttataaaattgttctctatcaagttttacttatagtacttaattcgctcccgtcatttaccataagtaaaacgggaggtaagtatttatttaaattcgt

SEQ ID NO: 3216 - DNA, 107 bp, synthetic construct
  source 1..107: mol_type = other DNA
tggggatttttacttcgacacttctggggaaattacgcccgacgttgacaggccggtgtcagcgtcggatagatactccccactttcgtcgaagtaaatttccccag

SEQ ID NO: 3217 - DNA, 118 bp, synthetic construct
  source 1..118: mol_type = other DNA
gtctcaagagaattgtaatataataatgtaataagaatgggttatgtaatcgcagacgaatatcattgtaaaataatcctattataaaaatttatagcgaaataaaaaggaaaaaatg

SEQ ID NO: 3218 - DNA, 103 bp, synthetic construct
  source 1..103: mol_type = other DNA
tcattgaatataaagaattattagtttacgggtaaatattcccaataatgttgtataattaacccgtaataaaagaagacgggtgacaagcatgaagccaaag

SEQ ID NO: 3219 - DNA, 103 bp, synthetic construct
  source 1..103: mol_type = other DNA
ttttttaattcaatataatactttctaatttgtgtaagagaatatgttgcatctacaacatattctcttacacaagtatttatatggataaatatttagatat

SEQ ID NO: 3220 - DNA, 105 bp, synthetic construct
  source 1..105: mol_type = other DNA
tttcgttgaagatgctttattaattgtagtgtttcttgtaccctcacgctaaggctaccagttacaaaaaacactattatttacaatagctaaaatttgagcttg

SEQ ID NO: 3221 - DNA, 105 bp, synthetic construct
  source 1..105: mol_type = other DNA
ggtcgctctcactcatacccccatgctacagacctacatcgaacatggacgcgttggcaggaacgcaaagccagatcagtaagcaaggaccagtagcgacgaccg

SEQ ID NO: 3222 - DNA, 103 bp, synthetic construct
  source 1..103: mol_type = other DNA
gcactgtcgctgagctgtacccgtgcgtgtatggttagggcaggcactcacccgggtgcctcgcctagcactgcatggcgttcgactcgctcggaagcaaata

SEQ ID NO: 3223 - DNA, 107 bp, synthetic construct
  source 1..107: mol_type = other DNA
tctgacctgtttaaagtcacatctgtcaaatcacaacagggtaaacgttctctaatgcctaccccgttaggaatcaacatgatagactgtaaagataacgcaggtga

SEQ ID NO: 3224 - DNA, 102 bp, synthetic construct
  source 1..102: mol_type = other DNA
tcacgtaccctgcgacattttttcgggttagtaaacagaccgtctccacatgtgttgtcaataggataggaatacaaattattaacctcgtcgcttgaatga

SEQ ID NO: 3225 - DNA, 105 bp, synthetic construct
  source 1..105: mol_type = other DNA
cttgaggatagcaagaaaccattcaaatttcacttaaaccaatattgatcaccatcaattttttattaatggcaataatatgcagcctttcaaacataggagtgt

SEQ ID NO: 3226 - DNA, 103 bp, synthetic construct
  source 1..103: mol_type = other DNA
aaacagtttcatacaagctcctttgttttgcgcagttgtgtactacgctgcgagcatagtacactgctactgcacactacagcaaccggagtactacagtgaa

SEQ ID NO: 3227 - DNA, 104 bp, synthetic construct
  source 1..104: mol_type = other DNA
ccgcatcattccgccagcatggccgcgctcaccggcggcggcatgcgcgccaagtcggtcgtcatcgacctgccccgcgaggtcaaggatgtgctggtggctga

SEQ ID NO: 3228 - DNA, 109 bp, synthetic construct
  source 1..109: mol_type = other DNA
ccccgcaccgggatggtggtgaaggtcggctgagcgggttcctgtgaagtgaagaagtcattcggcttgttcattcagcgtgaaccctcatatgatcctgcgcatgatc

SEQ ID NO: 3229 - DNA, 109 bp, synthetic construct
  source 1..109: mol_type = other DNA
ctacgccggttttaccggaaaattcatttacttccttatgggtgtccgcctaatggcggtagtccataaggaaatattgcaaaatttgtgacgaatgccaggtaaacgg

SEQ ID NO: 3230 - DNA, 104 bp, synthetic construct
  source 1..104: mol_type = other DNA
tcccttgatcgcatgcagtcactccgcgtagcactcctaaggaaatttgaccctggagaaatttccttcggagtacgtttcatcaaagggaggcatttcggacg

SEQ ID NO: 3231 - DNA, 108 bp, synthetic construct
  source 1..108: mol_type = other DNA
aacgtatgtatgaaaacagcttacttttcatttagtgttcacttttgtacttcggattgccgaaagtaatttgtgaacacatcatactcacctgttaaaccctatgtc

SEQ ID NO: 3232 - DNA, 109 bp, synthetic construct
  source 1..109: mol_type = other DNA
agtagatgagtgtgcgcacgaggtgaaacgtacaccatccctattcccggtctactggtttagcgggaataaagggggtgaggtctcccctggtcagcgcgtcggcgcg

SEQ ID NO: 3233 - DNA, 109 bp, synthetic construct
  source 1..109: mol_type = other DNA
aaagcagtatggcacaggtttttagttatgacaaaaagggtataattagtcttaattaactatacccattttgtcataagtagagattctcttagaacgtagtatttgc

SEQ ID NO: 3234 - DNA, 102 bp, synthetic construct
  source 1..102: mol_type = other DNA
actttgattttaatggatttattgtatctgtcatcattatatcactgtccccctacaatgtcaagcaattgttacataaaattagacgatatttctatcgcc

SEQ ID NO: 3235 - DNA, 112 bp, synthetic construct
  source 1..112: mol_type = other DNA
accccattgaactttaggtaatgactcctcgtaacacacatataaatctattccatcgccttgatgaaggaatgattttatatgtgtgttcgtcactttcccaagccatatt

SEQ ID NO: 3236 - DNA, 113 bp, synthetic construct
  source 1..113: mol_type = other DNA
gtaatcgtgtacgatgacaaagttgacatcgacacgattgtgacctttgctggtggaggcgagccagattaaactcaggatcgccctgctttatccgttttttgcttcctcaa

SEQ ID NO: 3237 - DNA, 102 bp, synthetic construct
  source 1..102: mol_type = other DNA
tccattccgcactttttaactgcgtcttgtgtgcccttgtcaagagatgtaagcaacggttgacaagggcatacacgataaatttacaaaaactgaactgcc

SEQ ID NO: 3238 - DNA, 103 bp, synthetic construct
  source 1..103: mol_type = other DNA
gaatcaagttgtttaaaaaaggcaaaaagttatcaccaaaaaccatgacacatctcttggttgttggtgataaccattgtaaaatatactaataccgaggttt

SEQ ID NO: 3239 - DNA, 102 bp, synthetic construct
  source 1..102: mol_type = other DNA
catatgagtcaagcaaataaagtgtatctcatttttaaacgaaacatgtattacatttaaaaataggaattttaccccatatgatattatacattaactaag

SEQ ID NO: 3240 - DNA, 104 bp, synthetic construct
  source 1..104: mol_type = other DNA
aatcagtttttatcgtttttgacctaaaactatcttatgagcatcggcctaatggtcgtatcccgtaagaaagttttatatgaattttggcgaaatggcatgat

SEQ ID NO: 3241 - DNA, 106 bp, synthetic construct
  source 1..106: mol_type = other DNA
tgggcatgatggaaggctctgaaacggttcactgcatagcttacacttccgcaggctgaatttctatttatgcagtgtttcgtccccgcgttgattgctaggcggg

SEQ ID NO: 3242 - DNA, 102 bp, synthetic construct
  source 1..102: mol_type = other DNA
ttcatctgttattcaaggcaactgaactcgtcaccatgaattatggcatatctttgccacaatgtcaagtgatgaattcaaaaaagacaagcactatccaaa

SEQ ID NO: 3243 - DNA, 112 bp, synthetic construct
  source 1..112: mol_type = other DNA
agagctgctgttcccatggctgaactctacggtgatgactcacgcttcgtgcacaccaactgtgtttcgtcaccgtagatttacgggcatggcggtctcactgcctgagcag

SEQ ID NO: 3244 - DNA, 114 bp, synthetic construct; identical to SEQ ID NO: 1317
  source 1..114: mol_type = other DNA

SEQ ID NO: 3245 - DNA, 112 bp, synthetic construct
  source 1..112: mol_type = other DNA
actcggttattcactatcacgccgttattcatcaggcgctgaaatacgcaatgaaaaccgacatggtaccgcagaatgttgccatgaaggtggataggccgaggaagaactc

SEQ ID NO: 3246 - DNA, 111 bp, synthetic construct
  source 1..111: mol_type = other DNA
cgtccatcagggatgtgaagtccgccggatttgttgttcgccctggaccaccggggaacagtcaacggtctccctgggtaatatgtcaactgtgaccaactgcttgctgta

SEQ ID NO: 3247 - DNA, 138 bp, synthetic construct
  source 1..138: mol_type = other DNA
aaaaactgccattatatcaccttcttttgttttcttttttatctatagataaagtaagacattactacaaaactcccaaaaattattgtactattattgctaaaaccaagttagctaataatctatatctatactctt

SEQ ID NO: 3248 - DNA, 110 bp, synthetic construct
  source 1..110: mol_type = other DNA
gcggcaaggaactcaagcttgccgacctgcgaggtaagtgtgtcgtactagacttctggaagtcctacacaatgtagggatctccagagggggcgtacgtgcaccaccac

SEQ ID NO: 3249 - DNA, 105 bp, synthetic construct
  source 1..105: mol_type = other DNA
gactgacgcttttttcctccgctatcacgaaggtggggaattgtctattgggttctctttttcttctattccccacctttggctcgtggaaaccgcactctcttt

SEQ ID NO: 3250 - DNA, 106 bp, synthetic construct
  source 1..106: mol_type = other DNA
aaataagcgattgcttagaaatatattataattagtcccttttgtaaaaaggcggttcgtattacaaaagggacattaaaggaggcttatatgaattattgcaaat

SEQ ID NO: 3251 - DNA, 102 bp, synthetic construct
  source 1..102: mol_type = other DNA
tctaacaatacattcaggcttaaacaacattacgtatttcacaaattaacgcaaaagcgtagtaatgtaaagtacgtaattaaatcagcactaaatcccacc

SEQ ID NO: 3252 - DNA, 102 bp, synthetic construct
  source 1..102: mol_type = other DNA
gtccgcccgatttgacgcgacacgccgacgcacacaacttgcgattccgtgccagaaccgtaggctatgtgcgtgagcaccaaagcggcaatctacgtacgc

SEQ ID NO: 3253 - DNA, 102 bp, synthetic construct
  source 1..102: mol_type = other DNA
acgcaatgctgatctccgggagtgactcacctgtccatcacatattttcacccgacttagtgtgttggacagagtactgagttaccgtcgaacctatgccga

SEQ ID NO: 3254 - DNA, 116 bp, synthetic construct
  source 1..116: mol_type = other DNA
ttgattacccaaataagtccaaacgtgacagggactactaccgctaaaaggtggttgatggtaaacaacaacctttatacactagtaagcgaagctctaaaatttcccacccccgc

SEQ ID NO: 3255 - DNA, 109 bp, synthetic construct
  source 1..109: mol_type = other DNA
caattcgctgtttgagtaaaatgctatgatttgcgatttaacaactatacagtaatattgttggtaattagcatatcaagtataatgtcttaaatttgaggtgtttagc

SEQ ID NO: 3256 - DNA, 102 bp, synthetic construct
  source 1..102: mol_type = other DNA
ggggtgtggggtaacacctagacgctggtagtcaacgtgttgctatctgtgtacgcatagctatagactgacaactatgtccaaacctcttagagccctggt

SEQ ID NO: 3257 - DNA, 105 bp, synthetic construct
  source 1..105: mol_type = other DNA
tgtcagacagcgtggcgcagctcgcggatagttttaggcttttttccatatgcccccagttcgacacatggccacaaacgggcccgacgggcaagaagctgctgc

SEQ ID NO: 3258 - DNA, 105 bp, synthetic construct
  source 1..105: mol_type = other DNA
gggctctcttctcggtcggcgggctgttcgtgtggcactgcttcacaacccgcacgcagaaacgtaccatgtcccacatgacattgcgagatcccctcggccggg

SEQ ID NO: 3259 - DNA, 106 bp, synthetic construct
  source 1..106: mol_type = other DNA
gaaccttgccccgcgatcacgcggggcaaggttcgaacgttcaactttacgtggaggtaacgcgacagtgctcgaaccttgccccgtctctacagctggcggtctc

SEQ ID NO: 3260 - DNA, 111 bp, synthetic construct
  source 1..111: mol_type = other DNA
ctcaaccgctttggctccccgctctctgtgggtcaactgtccctacaagggtcgtcgtcggaacacaagaccccgtatttccccgtagtcggccggactgcctcgtcagtg

SEQ ID NO: 3261 - DNA, 102 bp, synthetic construct
  source 1..102: mol_type = other DNA
ctgcggtccttgcggtcacacgcctattatgccatgtttaatgggaggcattaacaacccgctagtggtgtcaccgatgcctagataacggtcccgatgagc

SEQ ID NO: 3262 - DNA, 105 bp, synthetic construct
  source 1..105: mol_type = other DNA
taaatggatgtatttatatgaccgttattatgtacggaacccccgcaaattgcgagaccttttagacccttccgtgtgtatcacaacaccaaaaccaagaggtga

SEQ ID NO: 3263 - DNA, 108 bp, synthetic construct
  source 1..108: mol_type = other DNA
agattatgtgaggcgaacatctaaagaaaaccgaatagactttattcaatggtcattgtattgtagctattcggcattgtagcattagccataacggttataagctta

SEQ ID NO: 3264 - DNA, 100 bp, synthetic construct
  source 1..100: mol_type = other DNA
gtgaaagatatttattcttatatcgaactcacgttaaaataagatagttaagaggaagagctgttccaacggtgtgggctgttcaaactcccggttggtc

SEQ ID NO: 3265 - DNA, 103 bp, synthetic construct
  source 1..103: mol_type = other DNA
ctaatttgacgttcaaaaacagcttaaaagtgtcctattatcatgacagaacattctgttttgataataggacaatgcacgttaagaaatcgcctagttaaat

SEQ ID NO: 3266 - DNA, 107 bp, synthetic construct
  source 1..107: mol_type = other DNA
acagggccgctcggtgtttcgttgtcatagatagtcaaagagtactgagttgacgaacacagatcaagttgaccaccggtcagcggaacctcgccccggccagtcgg

SEQ ID NO: 3267 - DNA, 110 bp, synthetic construct
  source 1..110: mol_type = other DNA
attatgcggttttaaatttttactttaggggtgtagtaacacataaaaatccgttgaattatatattttactacaccaacaaataaatagaagacatataatattactat

SEQ ID NO: 3268 - DNA, 103 bp, synthetic construct
  source 1..103: mol_type = other DNA
cttccatagtgagcaggtgctccttctatatctgcctcagcaatgctgggtgaaccgagcatgtccgaggcgggttgggcttgttccttgattctacggggtt

SEQ ID NO: 3269 - DNA, 110 bp, synthetic construct
  source 1..110: mol_type = other DNA
gatcacggcgcgtgagatggtcatctgaccagcgtatacctaaagcgtaacgtcgtcggtcattggggcttacaggacccgtaacggaccagtccgattccgacgtgccg

SEQ ID NO: 3270 - DNA, 146 bp, synthetic construct
  source 1..146: mol_type = other DNA
acactcaaattgaataatgatattatcaaacaactatttaataaccatccactcgacgaagtgcccctcagcacttcgtctttatttttgccacaacctttttatttaacaatatagtttcagtggtgtgttttttgaaaacagtg

SEQ ID NO: 3271 - DNA, 119 bp, synthetic construct
  source 1..119: mol_type = other DNA
tagctgatatgcatccaatcagtaaccggaggagggttactaacaattgaatacgccgaaaagcgctcttatgcaattagtagtttttatcccacgaggatgtgatttgatttctgaga

SEQ ID NO: 3272 - DNA, 102 bp, synthetic construct
  source 1..102: mol_type = other DNA
aataagggaagagaaagaggactttaagtgcatatcatttaacatagaataagtcttacgttaaatgatatgtacatcgaggaaaggatataccttcctcaa

SEQ ID NO: 3273 - DNA, 103 bp, synthetic construct
  source 1..103: mol_type = other DNA
aaaatctgcttttaattttcagcacaatctatcataaaagtaattgttactggtaacaattacttttgtgatagaaaataagaaacaagttatttagaacttt

SEQ ID NO: 3274 - DNA, 102 bp, synthetic construct
  source 1..102: mol_type = other DNA
cacatgaaaagcacgggtaatttggagtcatgtattcggtaaatcacggctcaccgttgtttaccgaatgcatgactctattcaaatatacgatgattttca

SEQ ID NO: 3275 - DNA, 104 bp, synthetic construct
  source 1..104: mol_type = other DNA
gtgcgtattgagtaaatggagcgcccttccctttacatccgtgcgggcttggaagcagccccaaacggttgtaaaaggaaatcctaacgcattgcagctaggac

SEQ ID NO: 3276 - DNA, 102 bp, synthetic construct
  source 1..102: mol_type = other DNA
accgtgcgtggccgcttatggttttgtacagccccacttaaacacacgagaacccgtattgtcaagtgatgcggtagaattatttgcatggacttctttatc

SEQ ID NO: 3277 - DNA, 102 bp, synthetic construct
  source 1..102: mol_type = other DNA
ttgaattgattaaaatattctttgttaccagtgttatgttttgttatactcatcttatacaaaacataacactggagaattacatactttaattggaggtta

SEQ ID NO: 3278 - DNA, 106 bp, synthetic construct
  source 1..106: mol_type = other DNA
ctatggagcgcgcagggcagcctcacgaacgtacctctcttttcaatttgcatgcctcagcagaatgaattagggtgcatgtcatggcccctaagacccgaccacg

SEQ ID NO: 3279 - DNA, 100 bp, synthetic construct
  source 1..100: mol_type = other DNA
tgctctcacctgatcttctctgccgggaggctacaggttaactacacatgcacacgcagctcacggttagcgtacagaccccgccaccacggcagagggc

SEQ ID NO: 3280 - DNA, 110 bp, synthetic construct
  source 1..110: mol_type = other DNA
accggggtttttttatgtccgcacattaccttttcccatttcaactgaatcacaaagctgtttccaccaaaatgggaacaaatgacgtcgcctgtggtatcctgtgccaa

SEQ ID NO: 3281 - DNA, 109 bp, synthetic construct
  source 1..109: mol_type = other DNA
cctttattttaaaaggaattaaataatttttttattttctcccctgtaaacgttacacccgttacaagtttcatgggagaaaattataaaggttacatttgtatgggaa

SEQ ID NO: 3282 - DNA, 102 bp, synthetic construct
  source 1..102: mol_type = other DNA
aatcccttattttaaggcttttccggtcgtttcctttatcttactctattgggataatgtattatagtggaaattttgaaatttcctttatccaatagggta

SEQ ID NO: 3283 - DNA, 101 bp, synthetic construct
  source 1..101: mol_type = other DNA
gtcatttagacatacttcctttcatcaatgatggttttccattttccggcatatattataaaatcatacgcaatgagtgtagcgtatgatgaggctaaatc

SEQ ID NO: 3284 - DNA, 102 bp, synthetic construct
  source 1..102: mol_type = other DNA
cttgatttcattgggttccttgctaacttggtcttattataacacggtcacctgcctgtgtcaagtaagaaccaaaaaaaatcataaactatctaaaaaagc

SEQ ID NO: 3285 - DNA, 105 bp, synthetic construct
  source 1..105: mol_type = other DNA
ttaattagtaatatacggactttttttgtagtactaattattatcacccaagcggaaagtatcagttaggcacataaattacggcaagaaattaacagtgatatt

SEQ ID NO: 3286 - DNA, 104 bp, synthetic construct
  source 1..104: mol_type = other DNA
caaatataatacttttttatttatttagcgacaaaattgattactttctgtacacataatagtcaatattgtcgcaaactaatttttaggacagaaaatcggcg

SEQ ID NO: 3287 - DNA, 103 bp, synthetic construct
  source 1..103: mol_type = other DNA
tatctaatttcatagacttaaatacaaatgttactcttgtaactaacacgaggtattattaaatacaaaagtaactacttaaatagtttacttaccagctctt

SEQ ID NO: 3288 - DNA, 109 bp, synthetic construct
  source 1..109: mol_type = other DNA
tcaccatttaaatcagataaaagcaaatttaccataaagttatcggcttatatgtatatgggccgatagctttatggtaaaatataaaaccgcatatttacggctcttt

SEQ ID NO: 3289 - DNA, 102 bp, synthetic construct
  source 1..102: mol_type = other DNA
tctgtatggaattaaaattgcttccatatgcctataatacttgagcgaactcaatggctcttgaattataggtacattatggaaatttaattgatttctcca

SEQ ID NO: 3290 - DNA, 105 bp, synthetic construct
  source 1..105: mol_type = other DNA
tggcgtattgccctggattggtgaaaatgttgtaataagcgtcacacactcaaatgtgttatgcttatacaaacaaaaattagaaggtttaacatgaaaaaagta

SEQ ID NO: 3291 - DNA, 146 bp, synthetic construct
  source 1..146: mol_type = other DNA
taaatgtcagacagcctaatttctcacgaaattcatgcgatttaatgcgcctgggggtcaagaggccgcaggttcaagtcctgtcactcggaccaaagaaaaaccgcttatagatcttcaaaagagatcgattaagcggtttcttt

SEQ ID NO: 3292 - DNA, 108 bp, synthetic construct
  source 1..108: mol_type = other DNA
cgtcaggcgggggtgggggtggctttttgattgtaatcttttaacctttagggcaacctaaagaaacaaagcctactttcggtgcgtgttttgtgttagtcattaagg

SEQ ID NO: 3293 - DNA, 109 bp, synthetic construct
  source 1..109: mol_type = other DNA
ttgtcttgctacagtaaagtggaataccttctttatttgcaatcactacgcatctcaaatgtgatgtgtagtgtttgcgaatacatagtgcaaagaaaataattaaaat

SEQ ID NO: 3294 - DNA, 102 bp, synthetic construct
  source 1..102: mol_type = other DNA
tcaaaaagggattattatcgctcgcttttactaacgacaatgatacaacacatgtagagtccattgttctgttgcaaagaagataaagtaaacatcaaatca

SEQ ID NO: 3295 - DNA, 122 bp, synthetic construct
  source 1..122: mol_type = other DNA
ataaacaaacttgccatttcttgctgttgtggattacatctccaaacatctcgacaaatcgggctttgataagcttgtccaataattgtaattcctgtttacacaaatcaataactttttcg

SEQ ID NO: 3296 - DNA, 131 bp, synthetic construct
  source 1..131: mol_type = other DNA
tgcttagcccgcgggttccaacgcgtaggaatgtctactgtggaagctgtaaatcgaaagatttcatggctttttggtttttctggcagaggtcgcacacacttgcacactttctgcacactttacaaaaa

SEQ ID NO: 3297 - DNA, 108 bp, synthetic construct
  source 1..108: mol_type = other DNA
atatcttgggatttttagcgcatataacaaacataccgactatataccgtttcaatcaagtataataaatatatttttcttcctattaaatatgttaaatttgaacaa

SEQ ID NO: 3298 - DNA, 100 bp, synthetic construct
  source 1..100: mol_type = other DNA
cttggcaaggccgggctggctccaaacaatccgaaattcagcgcatcgcattcgaatcctactcggggagccaacttgaaacgcccgagccacccgaccc

SEQ ID NO: 3299 - DNA, 103 bp, synthetic construct
  source 1..103: mol_type = other DNA
ttcgttggatacatcgaagcataagttgtcattctttattcgaggttgactaatgacagacttgcataaagcatgacaagaaaaacagtggtgcgaatgcaat

SEQ ID NO: 3300 - DNA, 102 bp, synthetic construct
  source 1..102: mol_type = other DNA
ttagtaacttattaacattatggcttaatgttgcaaataatacaaaagtcctaactattaaagtataaagtaaacttaataataagaccacgttcaaggtaa

SEQ ID NO: 3301 - DNA, 102 bp, synthetic construct
  source 1..102: mol_type = other DNA
catcaccattcgtggcaacgggcgaggaaggttatagcgaacaccacacccctctgtggtgtggtaaattaccttcctatgaacgccccgaaaacggccatc

SEQ ID NO: 3302 - DNA, 113 bp, synthetic construct
  source 1..113: mol_type = other DNA
gacgtacgccttcacagcacgcttggcaagttcaggcgttgtgcaaactaggtcgatccgccatccggtcgcaacagagccaactacgctgccgagcatgaaccaattaaggg

SEQ ID NO: 3303 - DNA, 104 bp, synthetic construct
  source 1..104: mol_type = other DNA
actccgtattttgcaccgcaaagttcacccctaaatgactgatgattccggtacgccgcagtcaccggtcattcgtggttatctctcctgtatttatcataaat

SEQ ID NO: 3304 - DNA, 102 bp, synthetic construct
  source 1..102: mol_type = other DNA
ttgctcatctttggtggactcattcttagtgtagatagtcatacaatagcagggtttgtagtttctatctacactaaagttgatactcatagtatcgaggtc

SEQ ID NO: 3305 - DNA, 104 bp, synthetic construct
  source 1..104: mol_type = other DNA
tgtcgaacgatctagtaggatctttgttggtatcaaagtgtttccggtgggtactcacctacaagattttgataccggctataattccaagagttaggaggatc

SEQ ID NO: 3306 - DNA, 104 bp, synthetic construct
  source 1..104: mol_type = other DNA
catggtcaccccatccgctcaggtaaaagccacccttgcgaatgttctactactagtagatgcacaaagtcaactattcgctgagacacgcccagcaggtgacg

SEQ ID NO: 3307 - DNA, 114 bp, synthetic construct
  source 1..114: mol_type = other DNA
cctagcgcacgcacagaacgtatgttacagtagtatgcgtaggtcaaggtacggcccgacctacaagagagaaaacagaaaaccaaagacagagcaacatcgaggagagtccga

SEQ ID NO: 3308 - DNA, 108 bp, synthetic construct
  source 1..108: mol_type = other DNA
acctgcgtatatagggagtcgacgactaccctcattcagtcaagtacgcctggagcgttttgcctgtagtacgtaagtcgggggagccggtcgtgccctcgaaggagg

SEQ ID NO: 3309 - DNA, 102 bp, synthetic construct
  source 1..102: mol_type = other DNA
ggcccgctgaaaaccggtaacacccgtggtactacggcgggtgcttatcttcagagaaaccctcttagtggtaccgtacggcgcatggcgacaaaactgcaa

SEQ ID NO: 3310 - DNA, 102 bp, synthetic construct
  source 1..102: mol_type = other DNA
aataattaattatgtaaatggcagaaattattaaaaaataacatactatttttatggttttatatattttgataatttctgttccataactcaagaattgta

SEQ ID NO: 3311 - DNA, 108 bp, synthetic construct
  source 1..108: mol_type = other DNA
acaacgatatcaccttatggatcgtagcgtttttatgtgcttttaattgttatcgcaaaatgttacaatcaaaggcacacacctccgaagagatctacaagctgtggg

SEQ ID NO: 3312 - DNA, 109 bp, synthetic construct
  source 1..109: mol_type = other DNA
catagatttggatttgcgcagtgatgcaatgcgcgggcctaatttaatttccatataaaccctccttcttttacgtaaatctaactatactataacaatttctcaaaat

SEQ ID NO: 3313 - DNA, 102 bp, synthetic construct
  source 1..102: mol_type = other DNA
ggaggttgttttcttacctcccgttcaatgaggggtaatttactgtagggttgacctatgtgtcaagccccttatcaattttttacggttcgagcgtaaatt

SEQ ID NO: 3314 - DNA, 106 bp, synthetic construct
  source 1..106: mol_type = other DNA
gcaggccccacagttcggacggcacttcataagtcgaattaggtggcggacggcttcccataagtcatataatgggatactaacatgacttcctcagcctccgaat

SEQ ID NO: 3315 - DNA, 106 bp, synthetic construct
  source 1..106: mol_type = other DNA
cttgcggcctgtggattggagcttatcactcttctacacattgccgcatccttcacgcagaatgctgcaatgtggggattatcctacagaccccgtaacaggcagt

SEQ ID NO: 3316 - DNA, 104 bp, synthetic construct
  source 1..104: mol_type = other DNA
attcacaggtttagagactgttttgagtcaataatgctgagattaattagatcaattaaatttagttgggcattatagtttcaaaagagtccctaaagctgttg

SEQ ID NO: 3317 - DNA, 103 bp, synthetic construct
  source 1..103: mol_type = other DNA
cgcatgaaacctaagaaaaatggcgtgacatcttttttgtcacgccatcatgggtttgtgctacaaaatagatacccatcgcaagcgcaggcaaacaatctga

SEQ ID NO: 3318 - DNA, 105 bp, synthetic construct
  source 1..105: mol_type = other DNA
gaaatgcggtaactatccccctccatttttaggtatatgaggttataattgatgaatcggttattatctcatggtactaaaaaatcatcttgcagtatgttatgc

SEQ ID NO: 3319 - DNA, 102 bp, synthetic construct
  source 1..102: mol_type = other DNA
ccatggcggatcaccgtgccggagagttccacctttagcaaggtggtacctcagacgcaccttactaagggtggactggctctgacctggggaaacggccca

SEQ ID NO: 3320 - DNA, 113 bp, synthetic construct
  source 1..113: mol_type = other DNA
attgcggctttttactgctttgaaattggctgttatcctatgtgttcgaattcatctgcacatacaggataacaattacttttattgctgaaaagcctgcggaattatgtagc

SEQ ID NO: 3321 - DNA, 114 bp, synthetic construct
  source 1..114: mol_type = other DNA
ggcctaactgacggtgagggagtctgctctaaaggttaatcggctacggaacgtcgtcgagttccggtttaatgtgtaaaatcgctggtcaggggcaaatgttgggtcggaagg

SEQ ID NO: 3322 - DNA, 103 bp, synthetic construct
  source 1..103: mol_type = other DNA
tcctattatctcaaaataagtttgtttaccgatataaacgtgggtttgatgaattaaacccacgtttatatcggtaatattatcctccatataatggaaaaac

SEQ ID NO: 3323 - DNA, 111 bp, synthetic construct
  source 1..111: mol_type = other DNA
ttaatctttggaattactaatatattttttagtaatatcactgatagggagaagcgtatcacaaataaaactaaaaaataagttgcgaacaacttagagggtggtttagag

SEQ ID NO: 3324 - DNA, 104 bp, synthetic construct
  source 1..104: mol_type = other DNA
tcgagcgaacaaactattaaacttcatgacaatattgactatctggtattgtgaacaacgttagataatattgttaaattgcaaaagcccagtgaatctccatc

SEQ ID NO: 3325 - DNA, 106 bp, synthetic construct
  source 1..106: mol_type = other DNA
ttcatattaattggtcgctcaaaaagtttgtatgcacaccttaccacagtactcactttaagcataggtgtgcatacataaataagtaactgattaaaaagtaaat

SEQ ID NO: 3326 - DNA, 103 bp, synthetic construct
  source 1..103: mol_type = other DNA
acgcgagtagaggtcatgcctgaattttgcgggttttttgacgtactagctagctgatgcgtcaaaaaacccacgattagcagggctttgaaccactccgcaa

SEQ ID NO: 3327 - DNA, 103 bp, synthetic construct
  source 1..103: mol_type = other DNA
tcatagcgcaaagacaagtagattttatgggtgtattgtagcacaacctgttagtgttgtgaaacagtacaccggtaacctcagtgctaaggctgaacctccg

SEQ ID NO: 3328 - DNA, 107 bp, synthetic construct
  source 1..107: mol_type = other DNA
gcgaagttatcgaacgcccacccgaacaccacctctaaatacttttgtgggtccagaaacctatttagggatggtaatacttcgctagcatcacccgcatgccctac

SEQ ID NO: 3329 - DNA, 105 bp, synthetic construct
  source 1..105: mol_type = other DNA
aacccacgtatttacgggctttccggctactttataggttgtgacaatttggtcaaccattttgccacaaccgataaagttatttcttcttattttaaaggaatt

SEQ ID NO: 3330 - DNA, 109 bp, synthetic construct
  source 1..109: mol_type = other DNA
agcatttgcagtttaattttagttattaaaagtatctacactgttagtatgggcgttcctatttaatcactgtagataatttatatgctcagtacgttgtgttataatc

SEQ ID NO: 3331 - DNA, 107 bp, synthetic construct
  source 1..107: mol_type = other DNA
catcgctcgcgtcaaggcgaaatctccgcggtaacaatcggccggttacattgcaaggtaaccgcccgattggcaccgcctgccggatagcgccttgatggcctaag

SEQ ID NO: 3332 - DNA, 113 bp, synthetic construct
  source 1..113: mol_type = other DNA
aagggcgtaacaagaaaaactcccgaaccatataggtttgggagtttaggtggtgccgctggcacataacctcaaaaattctcgaaagccctttattttctgcacactggcgc

SEQ ID NO: 3333 - DNA, 104 bp, synthetic construct
  source 1..104: mol_type = other DNA
atacaacaaaccacaaaacaacgtttttgtgtgcaaacagcatgcattcatatggatacacacaatttgcacacacgccggaatgccttgaaaatcaagggaaa

SEQ ID NO: 3334 - DNA, 110 bp, synthetic construct
  source 1..110: mol_type = other DNA
atgtcaatttaatacacacattaattgtgtgttgtcaggagatgtatgttatgacataataactccgacaacacacagcatatagatgtgtgttagtatcaaattaaaaa

SEQ ID NO: 3335 - DNA, 105 bp, synthetic construct
  source 1..105: mol_type = other DNA
ttggagggactgagtacacctctaagcttgttggtgcactctatccgatgagcagggtggaaggatagattacaccaaaatcataagcaaaggtgcttataggca

SEQ ID NO: 3336 - DNA, 145 bp, synthetic construct
  source 1..145: mol_type = other DNA
cttttttgttataaaagtgtttggaacaaacgcgccgcctgcatcggcacgatgcagaacataaggggtttgggcacagcccaacaagcattttgaatttgatttttagaaatcggattcaaaaatcgtgccgtggtaccacggc

SEQ ID NO: 3337 - DNA, 102 bp, synthetic construct
  source 1..102: mol_type = other DNA
gagtttatggagtattaataaggtgaaagataactttgacttattccactgtaacggaataagtgagagtcgtcttttgtttatacatcttttatccctatt

SEQ ID NO: 3338 - DNA, 111 bp, synthetic construct
  source 1..111: mol_type = other DNA
tgaggatattatatttttttagttttatttactgtagtaaccactgtaacccatctgctttatagtagttactacagtatttttattttttaatttttttcacaatatcaa

SEQ ID NO: 3339 - DNA, 105 bp, synthetic construct
  source 1..105: mol_type = other DNA
ttaatttggagactaaagattattttaatgtagtttaccttgtgcttaataaaataaagttcggagcaaaacaagaaaatatagggtcgggtccaattcatttgc

SEQ ID NO: 3340 - DNA, 107 bp, synthetic construct
  source 1..107: mol_type = other DNA
gaagcaaatataggtattaaatttcacttgggcaagtctatttagttaagtgagtataataaaacagaaaaacccaactggagatttaacatttcacgttgatatat

SEQ ID NO: 3341 - DNA, 104 bp, synthetic construct
  source 1..104: mol_type = other DNA
gctgttctttgcctcaaaatatagtttttccccagggtactctcatgcccatgacgttcccttggggaaaaagggaaggaggcgcaaaatgaccaggaaacagg

SEQ ID NO: 3342 - DNA, 107 bp, synthetic construct
  source 1..107: mol_type = other DNA
ttaaattttcaattctaaattattagacgaccaatgtcgtctaatacggggtctcctcattgacgttattggacttttttatgattttagacttgaaaattcatgtt

SEQ ID NO: 3343 - DNA, 104 bp, synthetic construct
  source 1..104: mol_type = other DNA
gcgcttttccaaatatttatttttttataagcaacgcgcaacactcgacatgtgtcgggtgttgacggtagttatgttataaaaatataaatgaggtgcagtgg

SEQ ID NO: 3344 - DNA, 102 bp, synthetic construct
  source 1..102: mol_type = other DNA
tagggatcaaatcatgacgaagataatagaatattttagttcttgattgcttgtagttatgtgctaaaatattctcaatgtttctaatgagatgaatgtcat

SEQ ID NO: 3345 - DNA, 108 bp, synthetic construct
  source 1..108: mol_type = other DNA
gggcagtgcttcttttttgcgcaaaatgttgcctttttgacatagcagcatctgctgctgtatcaaaaaggcaacattttttgcagctgtattaaaagctccagtgta

SEQ ID NO: 3346 - DNA, 112 bp, synthetic construct
  source 1..112: mol_type = other DNA
agcatggccggtcgctgacctgcgaggcttggggaggctttcatcagcgttcggcctgccgaacgcctgcgaaagcctcccctggcgtgccatgctgaggcatgcccactga

SEQ ID NO: 3347 - DNA, 105 bp, synthetic construct
  source 1..105: mol_type = other DNA
atcagcccaggaagctcaaccgcacttgacggttgtctttgtctttattggtgtcgaccaacctccgttaggacaaccctgaccctaccgctgcggcgaatgcgc

SEQ ID NO: 3348 - DNA, 104 bp, synthetic construct
  source 1..104: mol_type = other DNA
gctgagtgcggacttcttgtgatctatatgtacaacaaagatattgtaataaatcatcgtatccatgttgtacatatgctgtgagatcatgctctttttataat

SEQ ID NO: 3349 - DNA, 102 bp, synthetic construct
  source 1..102: mol_type = other DNA
cgacgaataaagcctaagcgtttaggaattgtgcaaaataagtagtgtgtttgcaagttgcttattttgcacacgtacagggaagtctctaactccatgtta

SEQ ID NO: 3350 - DNA, 104 bp, synthetic construct
  source 1..104: mol_type = other DNA
tcccacgtatttaggggcttttctattagcgacaacatttttggactcacgaacgggcacaaaaacgttatcgctaattttttcttcctattataatgtggaat

SEQ ID NO: 3351 - DNA, 108 bp, synthetic construct
  source 1..108: mol_type = other DNA
actcaacccactataagtgggtcaaaatatctgaacaacttgttttcgcatcaccaaaaccagtgtatactcacgcaccttttaaaaacagtgggtttctatggctct

SEQ ID NO: 3352 - DNA, 104 bp, synthetic construct
  source 1..104: mol_type = other DNA
gctatgacattttgaacggctcaaataaataagcaatttagttacagatatacctgtggaagcactgaaattgcgcatctaattcaagactttagctttgtcaa

SEQ ID NO: 3353 - DNA, 105 bp, synthetic construct
  source 1..105: mol_type = other DNA
aagacaggttggagattgagtggaatttttagtattcataacgggctattcaaacaaccaatcatgaatactaaaattatcataaatatgcctcggtcatatcaa

SEQ ID NO: 3354 - DNA, 105 bp, synthetic construct
  source 1..105: mol_type = other DNA
gccgcatggttgcaagcttttctgaggttatgcttattataactcaggcgtttgcttgtgtcaagacatacataaaaaaattatcttcctaattaacggaagttc

SEQ ID NO: 3355 - DNA, 113 bp, synthetic construct
  source 1..113: mol_type = other DNA
ataaacaatattaattggagggtgaagttatcatccagacagcgaacattacaatgcaatttgtatagtagctaacacctccaagccttacacgttcacaatgaggctatctg

SEQ ID NO: 3356 - DNA, 104 bp, synthetic construct
  source 1..104: mol_type = other DNA
tctagaggaaaccgctcgcgaaatatgttaggtcctttgcgattgacatgagcattgcattagcataagaccctgcgtataatcacgttatgcaggtggaaaag

SEQ ID NO: 3357 - DNA, 103 bp, synthetic construct
  source 1..103: mol_type = other DNA
gcactcttcctaaaactctcatgcttactagcataccgtgtatcccacgagtgcgagtggaattaacagggtgtaataaaaaacccccacccggttaggggtg

SEQ ID NO: 3358 - DNA, 108 bp, synthetic construct
  source 1..108: mol_type = other DNA
gggagacgcggaaacacgcggcatagggagaatgacctttatatggactcttttgacaaagcgccgacataaccggtaaccgccgcaacgccaaagccccgcctcatg

SEQ ID NO: 3359 - DNA, 112 bp, synthetic construct
  source 1..112: mol_type = other DNA
ataaccgctaatggtgaaatgaataaaatgtttccgcaatgtaggaatagcattttcaataccttcacaacggaaacatattattacgatcaggaagtcgcttatcttaaag

SEQ ID NO: 3360 - DNA, 102 bp, synthetic construct
  source 1..102: mol_type = other DNA
cccggatcggggggtgtgggctctatttatgacacaagcgccccgacgtcatgacgtctgccccgctgtgtcacaatcagggacagtgcgacatcaactcat

SEQ ID NO: 3361 - DNA, 103 bp, synthetic construct
  source 1..103: mol_type = other DNA
aatagctgattttatcagctattttagttggggcaatattctatttcggcattaaccgaggttgagtgatatgccgaaatgggcaaaataaaaatcagacgaa

SEQ ID NO: 3362 - DNA, 105 bp, synthetic construct
  source 1..105: mol_type = other DNA
cttagggttaatctaagttctctttttttattaggttgttaatcgatgcttatattaataaatacgctttaattaacaatcctaattaacatgctacctataagg

SEQ ID NO: 3363 - DNA, 102 bp, synthetic construct
  source 1..102: mol_type = other DNA
cgtaagtcctctacctgcacgttttccatatacaaaccgtgaaacttgacgtctcaccgttcatgcattgtatactcgcatcatggcaggtcagagactttt

SEQ ID NO: 3364 - DNA, 114 bp, synthetic construct
  source 1..114: mol_type = other DNA
cgttgcaaacacactagtcagaggtcgatttggttcggggatcctatcataacgaagtcccacgattccgttgcgtcatactgtcgttatgcctaatgcgatcatctacacacg

SEQ ID NO: 3365 - DNA, 102 bp, synthetic construct
  source 1..102: mol_type = other DNA
ccgataaaatcgggggtttcgggggctacatcttttttgtagccctttgatgtctatgggctacaaaaaagatatttttgctgtttttgcgtatgaattcga

SEQ ID NO: 3366 - DNA, 110 bp, synthetic construct
  source 1..110: mol_type = other DNA
ctttttgcgtttatgggatatgtttctgcatatgtggtagaaatttctttcggcaacccgaaaagaatttctgcgtattattgtaactgattgattcttggggtgtttga

SEQ ID NO: 3367 - DNA, 103 bp, synthetic construct
  source 1..103: mol_type = other DNA
gaccccgccttatttggcggcgagttctatctagttgaaattcaacgttggaggacgtatactctcaactagattttcaattttacaggcggccatgcataac

SEQ ID NO: 3368 - DNA, 123 bp, synthetic construct
  source 1..123: mol_type = other DNA
cctttaattagatttgttatgaagcagcttttcaaatacgtgataacgtatcccataagcaggatattatgcaacattatcacgtatgtataattacagaactaattccttctagtatcttat

SEQ ID NO: 3369 - DNA, 109 bp, synthetic construct
  source 1..109: mol_type = other DNA
aaacacgaacactcccggagctagggcttcgggagtgtcggtatcgggtattgcgggggaagacaaccaacgatacttgcgattggtcgaccgcgaaataccccttctc

SEQ ID NO: 3370 - DNA, 104 bp, synthetic construct
  source 1..104: mol_type = other DNA
ggctgagactgagagctgcactcaccgctccaataaacggctatcatatgaacatgttgtagcctattacaggtccaccatgcctcagctccagatcatgccta

SEQ ID NO: 3371 - DNA, 105 bp, synthetic construct
  source 1..105: mol_type = other DNA
aaattaatattaaaacacgatatggtagtattatgtgtaagtgaaaataggataataaacatttgcacataatactatcatttattatctttgtactatattaaa

SEQ ID NO: 3372 - DNA, 107 bp, synthetic construct
  source 1..107: mol_type = other DNA
gatacttttttttccatttaaaacaccctttcaaaaaagcatgaaatagcatatccccctgtttattttttataatagcagctacactcggcatgaatattagttca

SEQ ID NO: 3373 - DNA, 102 bp, synthetic construct
  source 1..102: mol_type = other DNA
tctacctattcacctattcaattaaagttagtgcacaaacaacttctacatgcgtagtttttcattgttcaacagtattataatagaaagaacccgttattt

SEQ ID NO: 3374 - DNA, 108 bp, synthetic construct
  source 1..108: mol_type = other DNA
gttgtgtagctcttgatgtgcaatactattattggtttggatttttatcattcggacaccctaaagatataaatccaatttttggcataattttgtacaatacattgc

SEQ ID NO: 3375 - DNA, 111 bp, synthetic construct
  source 1..111: mol_type = other DNA
aataatattatattgataacagttcaaattacatcctaaataataaattatgaagtatcttaatttactgtttagggacaagcctgaagatactatacacctacaaagttt

SEQ ID NO: 3376 - DNA, 103 bp, synthetic construct
  source 1..103: mol_type = other DNA
gtttgggccttgaccagtgcaaatccgctgtttgtattgtggaagattagccttgctaacagtcaccaaccaaacagcggactagaatcgcttcatgggaacg

SEQ ID NO: 3377 - DNA, 105 bp, synthetic construct
  source 1..105: mol_type = other DNA
atacccgataaaatacaagaaaattaaatttccagatatgaaaatttactgtgatatgttttcatatatggaaaaatgagatatgatcataaaatactcataaaa

SEQ ID NO: 3378 - DNA, 103 bp, synthetic construct
  source 1..103: mol_type = other DNA
aataacgcctagggttgcaataaactcccggaaccatttccagtttttagatttcaatatcaccccagagacagcctcgatgacctggtaaaactcttcatag

SEQ ID NO: 3379 - DNA, 102 bp, synthetic construct
  source 1..102: mol_type = other DNA
ttctttgaggcaaagataattatactagatatatctgcaaatattttatcgtagatttaacatttacagttatatatagtatgtaataatactgattataaa

SEQ ID NO: 3380 - DNA, 105 bp, synthetic construct
  source 1..105: mol_type = other DNA
aatatttattggtcatggttccccctactgagctgtctatcatacattattctttaggaaaatagctattagacagctctctattttgtgaaattatttaggtat

SEQ ID NO: 3381 - DNA, 105 bp, synthetic construct
  source 1..105: mol_type = other DNA
cttcaatatccttaaataaaaaatatgcttgggtacatgatgaagtgttatactggtttaattagcggggatgtaaccaaatttaagtatgttctattaaatgct

SEQ ID NO: 3382 - DNA, 104 bp, synthetic construct
  source 1..104: mol_type = other DNA
gcgtcgctcccgtctcgataagtagtgtaaggcgcaaatgcgccgcaattacaagtaattcaaacacatttgcgccctacgagtgcgacagtttgatgaatgtc

SEQ ID NO: 3383 - DNA, 107 bp, synthetic construct
  source 1..107: mol_type = other DNA
ttggtcatttctgatgatccatttgcgttgtgttagaaacgatcatatcatcaagacgaaccgcacgatactaacactcgtaaaaaaacctagaacgcctgatttac

SEQ ID NO: 3384 - DNA, 105 bp, synthetic construct; identical to SEQ ID NO: 2908
  source 1..105: mol_type = other DNA

SEQ ID NO: 3385 - DNA, 105 bp, synthetic construct
  source 1..105: mol_type = other DNA
acccatgatgaaaaatccttcaaattttttactatataataacacgtataatggtgattagtgtagttattatatagtaaaatttgtgatcactaaccgtttgaa

SEQ ID NO: 3386 - DNA, 107 bp, synthetic construct
  source 1..107: mol_type = other DNA
ggaagcgcgaacctacgctcgaaagcgagagttcgacacttccccctcaggtggagccagaggggaagtagtcgaacttggcggcttccccttcagcaaaagggtct

SEQ ID NO: 3387 - DNA, 100 bp, synthetic construct
  source 1..100: mol_type = other DNA
acgcgaaactgcgggtttctccttgtttgcactacaatttgtatgtgaatacgtaaaaacggttgtgcaaacccgttgaacagcgcagattctgggcatg

SEQ ID NO: 3388 - DNA, 107 bp, synthetic construct
  source 1..107: mol_type = other DNA
ggggagcctatatggccctccgggcatcgtttacattagtggcggcgctatacatagcgactcgcctattgtaaacgatttgccctaagaaattgcttccagttcac

SEQ ID NO: 3389 - DNA, 110 bp, synthetic construct
  source 1..110: mol_type = other DNA
accgatcgaccccaacgacgcgatcttgacacatactttgacaacaacgcgccaggccgtcgttgcttttgtatgtatcaagagctcctacgcatcgaagcacgaagagt

SEQ ID NO: 3390 - DNA, 147 bp, synthetic construct
  source 1..147: mol_type = other DNA
caaacgaagaaatgaatgcacatgcccttgcagtttcgtatgtaacaggaaaagccctcggagttgatttagtgaaagtggtggaggggtgaaaaaaagcgcctgagcgcttctgtaactatgattgggtacgtaagtagatgatta

SEQ ID NO: 3391 - DNA, 103 bp, synthetic construct
  source 1..103: mol_type = other DNA
ttgtatcaattgggcagtgtcacaacaaagtacactaagatgctaacagtgcactattaactcgtagttgcacataaggtatttatgagtaatatcaccgatc

SEQ ID NO: 3392 - DNA, 105 bp, synthetic construct
  source 1..105: mol_type = other DNA
gatcgcggctcggagagcgggcatggcaggaaggttagcgcctgacaaccatggtcctcaaggtgaagtgttcaccgttctttcccagggtccggggaacgtctg

SEQ ID NO: 3393 - DNA, 114 bp, synthetic construct
  source 1..114: mol_type = other DNA
tccagaccataccgttatggaaagaataaatgaaatacgatagtaactctaaaacttcttttaggtcaaacatagtattttagatgatgtgataagtagccttagttcaatcag

SEQ ID NO: 3394 - DNA, 107 bp, synthetic construct
  source 1..107: mol_type = other DNA
tacaaatatcactatttgtagtctttttgtgtactgtaatttaaactggactggctgtacagcccagactaaataccttcaaaaatttctagacgaatcttcttagt

SEQ ID NO: 3395 - DNA, 102 bp, synthetic construct
  source 1..102: mol_type = other DNA
cccttgttttcaaggttttcttctaacttgtccctattatatcgcattcatctgcttgtgtcaagtaaagaccaaaaaaatttattttcaagaaccatctaa

SEQ ID NO: 3396 - DNA, 110 bp, synthetic construct
  source 1..110: mol_type = other DNA
tactgatttcagttgggtattcgtcctgccacttatgcttctgatactgtactggtgtcagtgaacatcctaacccagtagtgcgcttgctgggaggacaccagggagta

SEQ ID NO: 3397 - DNA, 111 bp, synthetic construct
  source 1..111: mol_type = other DNA
atttaatttttgggcgctttacgccttttttcgtatattaggtgtttccaattgaaactggttatacctaatatacgaaaatacacaaaaaagaacggcacccctcaaatg

SEQ ID NO: 3398 - DNA, 108 bp, synthetic construct
  source 1..108: mol_type = other DNA
gcggcacgcttggtcatggtgctcataatgcctcaccacgacgtaacgtcgtggagttccgtcacagttaggcatctgcatgcgcgccgcgccgggtgtgccggatgt

SEQ ID NO: 3399 - DNA, 115 bp, synthetic construct
  source 1..115: mol_type = other DNA
attaagaactcaaaccccttgatattgcacatttaacaggttgtgcaattgttactcttaaataagagtcatatcataattagattgcggaatccctatttaccagtctttgaga

SEQ ID NO: 3400 - DNA, 109 bp, synthetic construct
  source 1..109: mol_type = other DNA
atatttttctgcataaaaaattgtagataaatagttacttccaaaatgaaccaaggccacccttggttctttgtgagggaatcataactctaaattattaaatttatat

SEQ ID NO: 3401 - DNA, 107 bp, synthetic construct
  source 1..107: mol_type = other DNA
gcaccgggcgggcccgtcttcgtacttctaagtgagccctagcttgctcttcgccagtgcgaaagtcaacttatggcatacttcgatccatggccccccaggacgct

SEQ ID NO: 3402 - DNA, 116 bp, synthetic construct
  source 1..116: mol_type = other DNA
caaaagtttgttagaggtagttgtaatgtgtgtgcagtactaatgccttgccaactaacgaagaatatgttatagtacagcaatcagtggcactgctgaataaataagcgttgtta

SEQ ID NO: 3403 - DNA, 105 bp, synthetic construct
  source 1..105: mol_type = other DNA
ctcctcacaaaatgataataattatcaaatgtgaaactattatcatgactgtggtaatgtgatacaattcacacatgataattaatatcatttactggcgattat

SEQ ID NO: 3404 - DNA, 102 bp, synthetic construct
  source 1..102: mol_type = other DNA
acccgctgtttatgggcatttactatcatatccaactgcgtggagctaatgaattagcaccacacctttggatatgatagtttctacctatttatatgtgca

SEQ ID NO: 3405 - DNA, 102 bp, synthetic construct
  source 1..102: mol_type = other DNA
agttcacatttatcttataatttgatagttgttctttcttgtatgctccctcttcggcaagtaagaataaacaactgatattatatttttttaatcctttta

SEQ ID NO: 3406 - DNA, 114 bp, synthetic construct
  source 1..114: mol_type = other DNA
gcagaattccgggctcttccagagaataaatccaataaaaacaataacttaactgtttggtgcgccacgcagtcacgagcgaacgtgtttctcatcaagtttccgtgatccaca

SEQ ID NO: 3407 - DNA, 105 bp, synthetic construct
  source 1..105: mol_type = other DNA
taaccgagatatgtctttaactgcgatacgtcttaagcgtgatgtgttttaaaaagaggggcgctcttagcgccctcttaatgagccatagacattacacttaac

SEQ ID NO: 3408 - DNA, 104 bp, synthetic construct
  source 1..104: mol_type = other DNA
attaacggcttatgggatatcaaatttgggggtatatagtacatacttttgagattgttggtcctatatacccaaaccacttcaccccaacagggacagaagaa

SEQ ID NO: 3409 - DNA, 103 bp, synthetic construct
  source 1..103: mol_type = other DNA
ggcctctctttgtgcgaggtcaataagggtgtaacaacacaacattctttgacacaaaaagtcaagagttgcacgctatagtcattgggtgcgcgcagcgatt

SEQ ID NO: 3410 - DNA, 108 bp, synthetic construct
  source 1..108: mol_type = other DNA
aaatatttacatatcctcaaaatgtgttattatgctattgtacacttatccagggatttgtcaacaatgggggtataaaaattaataatatttattaaggattaattt

SEQ ID NO: 3411 - DNA, 103 bp, synthetic construct
  source 1..103: mol_type = other DNA
caatacatcataaaagctcaattttattcctgttaatcttttgtagcactgtagtttggtgtatgattaacaggaataaatgatattaagatttgcctaatct

SEQ ID NO: 3412 - DNA, 109 bp, synthetic construct
  source 1..109: mol_type = other DNA
gggaagcgcagccgccgcgccagtatggaatcagctccccatggtcagcgcacctgctggtcgcaccacatattttaaccatgtagtaggctcggtttatggctgaact

SEQ ID NO: 3413 - DNA, 102 bp, synthetic construct
  source 1..102: mol_type = other DNA
gaacggcaaaattttttacacttctattgcttctttatcacacatcaataaatgcttatgtgtcataaagtagcatataaaaattgatatgcagccctacta

SEQ ID NO: 3414 - DNA, 111 bp, synthetic construct
  source 1..111: mol_type = other DNA
aaccttctggtttttgcctgatagtattttaccatctaataaggtgcgcagaaccgtatcacaagtgatggtaaacaggaaaattaaatttacagtacatattaaaaagct

SEQ ID NO: 3415 - DNA, 102 bp, synthetic construct
  source 1..102: mol_type = other DNA
gacctgattttttgttgttagtgttttatctactgaatagtataacaggcttgcccattagccagccagtagataaatgcatttaaccccccgccataagta

SEQ ID NO: 3416 - DNA, 102 bp, synthetic construct
  source 1..102: mol_type = other DNA
cgacgaataaagcctaagcgtttaggaattgtgcaaaataagtagtgtgtttgcaagttgcttattttgcacacgtacagggcaatctataaccttttgtta

SEQ ID NO: 3417 - DNA, 105 bp, synthetic construct
  source 1..105: mol_type = other DNA
cagaaaaaatagcctgtatttactttttagtatatatcatgtcacaacgaatgaattgattgttaagtgatatatactaaaagatatgtggataacttcaaggtt

SEQ ID NO: 3418 - DNA, 105 bp, synthetic construct
  source 1..105: mol_type = other DNA
caccgcccgacgtacggcttgcgctatgggacccataaatgggattgtacgtgtacaagctcgacaaagagcaccactgaaagagaaggcccgacgtgagcggtc

SEQ ID NO: 3419 - DNA, 103 bp, synthetic construct
  source 1..103: mol_type = other DNA
atctttatcttacaaatatatggtattgatgtcattttattgtgcaaggagattcgcgagtcgtaaaatgacatcgttttgccgtaaaatggaagtatagtta

SEQ ID NO: 3420 - DNA, 109 bp, synthetic construct
  source 1..109: mol_type = other DNA
gttcccgagaacggacacactcaaatgacattcatactgaccactcaagccatgtggagactgtagtattgatgtcaagaaaatagaataacaagctataaaactgttg

SEQ ID NO: 3421 - DNA, 103 bp, synthetic construct
  source 1..103: mol_type = other DNA
aatattagttataaagccattctttaaaaagagttctcgtattttattggaggtcttgtctatgacataccctcactataaatttattacttaacttttttag

SEQ ID NO: 3422 - DNA, 106 bp, synthetic construct
  source 1..106: mol_type = other DNA
cctctaagcaccacgaaaggacatgaatatgcttgagaattgtgccacctcctgctcagaagaggctacatttactgaaggacaacttgcatcgactaatatctaa

SEQ ID NO: 3423 - DNA, 110 bp, synthetic construct
  source 1..110: mol_type = other DNA
gaatttgtgggacttgtctgcttactgtccggttttgtccggttagttcagcggagagacagggttatgaacctgtatctcaatatccttgaaattcaattctttatcaa

SEQ ID NO: 3424 - DNA, 102 bp, synthetic construct
  source 1..102: mol_type = other DNA
catgctgtattattacaatataacatgaaaagtttaatatgacttatgcggagatacaagtcatataatacctttgaaaaagcccccaaccaatcaaggcta

SEQ ID NO: 3425 - DNA, 107 bp, synthetic construct
  source 1..107: mol_type = other DNA
acgaaggtgcggcgtggtcatgggtgttactgtaaccccagtaagcagcagtccaggcattcggggctactgaggtttcagtagacggccccgccgggtgcgccaac

SEQ ID NO: 3426 - DNA, 103 bp, synthetic construct
  source 1..103: mol_type = other DNA
caaccggaacaacccctactttatgatgtgtgagaaaagactacccgtttgagaacggatagtcatataatgcacttttcgacctgcgggattaggacatatg

SEQ ID NO: 3427 - DNA, 102 bp, synthetic construct
  source 1..102: mol_type = other DNA
tacaccaataagcagctgtttctacagacggataacttttaggtactcacgaatgcgtacataaaagttgtccgtcaaaaaagcctttatttatgggagatt

SEQ ID NO: 3428 - DNA, 146 bp, synthetic construct
  source 1..146: mol_type = other DNA
ataacaagtactcagaatacaaaagatttgcattctgagtagttattgtattggcaggggcagaaggacttgaaccctcggcacgcggttttggagccatgccggacgtttttcaggacgtgtcagcacgttccaattagtgtcgg

SEQ ID NO: 3429 - DNA, 102 bp, synthetic construct
  source 1..102: mol_type = other DNA
actcacaagatcaattttaaaacaaatgggtagttattgaaatattcagaggtctcaatgcggttacaactacccctcgaccatgatccacttcggccgcct

SEQ ID NO: 3430 - DNA, 114 bp, synthetic construct
  source 1..114: mol_type = other DNA
gaggcttcgcggcttttattaactggatatttatcaggttttactgtttcgctaacactaaacggggaaaccttgtaaaatctgttttttggctttgttgtgttgtgttcatta

SEQ ID NO: 3431 - DNA, 106 bp, synthetic construct
  source 1..106: mol_type = other DNA
ttttccatcaaattgctacgatcaacaagtgtcggtctcgggtaaaactcgcccgggcatttaccgagaccgacaaacgggattgtacggtgtccggttttggctt

SEQ ID NO: 3432 - DNA, 105 bp, synthetic construct
  source 1..105: mol_type = other DNA
aggtgctttttaatttcatttaatgcccctccccttttatatatgctagacaagcaagtgttatataaatgagggtgaataaataaaacaaaaaacccccttcca

SEQ ID NO: 3433 - DNA, 122 bp, synthetic construct
  source 1..122: mol_type = other DNA
aatttcataggaaatacagacacactacaagtattttacaatctctaattaggcattaagcaatttatggcaaaataaggacggaataacacaacaaattctctaaaacaaatcactaaatc

SEQ ID NO: 3434 - DNA, 105 bp, synthetic construct
  source 1..105: mol_type = other DNA
accgccttttgtgtccgattcggtcacaatgttgtactaactataacgcacctacaggagcgtatgagatagtacaacaaacatcataaaaatactatctcaata

SEQ ID NO: 3435 - DNA, 112 bp, synthetic construct
  source 1..112: mol_type = other DNA
gcgcgtgtagataactgcctgcatatctagaatcgtactggttgacattcagccaaatcgtagggcaatctgtgactgttctaaatgaaaaacggccacgttcggtgctacc

SEQ ID NO: 3436 - DNA, 103 bp, synthetic construct
  source 1..103: mol_type = other DNA
ccatccgcttgaataaattctaagcgattgtttcattagggtatatgctttgtgccgcacttcccgtaattaaacaaacgaatatttgtattggattgattcg

SEQ ID NO: 3437 - DNA, 102 bp, synthetic construct
  source 1..102: mol_type = other DNA
accgttctgaaccgacacttaccatgtatggcctttctcctaaagtatgcgagcagtttttatcataaggaccttaatgaggggaaccagatagatagctta

SEQ ID NO: 3438 - DNA, 102 bp, synthetic construct
  source 1..102: mol_type = other DNA
gtatttggtattcaataacttaaataggtggaaaatacatacctaacttcataaagatgggtatgtattttccaccattgagttttcagtagtttaagacat

SEQ ID NO: 3439 - DNA, 104 bp, synthetic construct
  source 1..104: mol_type = other DNA
aaaattatctggaaaatttgatccgtcaacattacacgatgttcgtgttagcgaagcgttgtacaggtccagcttctccccgctggaaatcataagattgatct

SEQ ID NO: 3440 - DNA, 108 bp, synthetic construct
  source 1..108: mol_type = other DNA
taattttttctatgcttttcatgtatatctatatcaaaatgaagtacagtcctccgtacttcattttgatatatttttgataggggattttttgtcagattatattta

SEQ ID NO: 3441 - DNA, 114 bp, synthetic construct
  source 1..114: mol_type = other DNA
ggtcatgcagccccctgtcatcacgtgaaatactgcatgaagagagtacgtaccaccagcagtatctttcaagcagcaaaaacccgaacgggtactgcgggatcggggggacgg

SEQ ID NO: 3442 - DNA, 108 bp, synthetic construct
  source 1..108: mol_type = other DNA
cgacatcaggatcgaggtatttctgcgctaaaaacatctatcattatgaaaagcacccatgctttatacgatggtaggtgtttcaaacggggaacttctaaaaaaagt

SEQ ID NO: 3443 - DNA, 109 bp, synthetic construct
  source 1..109: mol_type = other DNA
cgcgtctcgaccatcccccgccgaagcgaagtggtccgttcgttaccccggggaacgcgggggtattctgggagacagttctcgccttcctggcggagcatgtactcga

SEQ ID NO: 3444 - DNA, 106 bp, synthetic construct
  source 1..106: mol_type = other DNA
aaagtgacgctaaaaacatatagctgttgaatgttcccatagattacaacaggacgcataaaatcatcaatgggcacattaaaaaaacttcatttactatttattt

SEQ ID NO: 3445 - DNA, 108 bp, synthetic construct
  source 1..108: mol_type = other DNA
tatagaggccatgatatacctaaaatcaattttgttaaactataataattccaacggtcatctcatagataacgataaaaattccaacagtaaccatctgctcaagta

SEQ ID NO: 3446 - DNA, 105 bp, synthetic construct
  source 1..105: mol_type = other DNA
gccccgacgtagagacagcaggtcatgaccgaactgccctatagccatgaagcccaccttcatgcagttagggtactttggtgatgtgaacccagctacacaggt

SEQ ID NO: 3447 - DNA, 111 bp, synthetic construct
  source 1..111: mol_type = other DNA
gccaggtcgaagcgcgcgctggccaggcgattgcgcaactcctcggcgcgcacctgggcgtgggaggtcgcgtcgagttcgcggatcaacttgcgcgacagttggctatgg

SEQ ID NO: 3448 - DNA, 117 bp, synthetic construct
  source 1..117: mol_type = other DNA
aagaaaaaggtaaacttattgttgatgtttgccgttgtgtttgtgaggcgatgttcaaagtaacacacatacaaatgaatatttgctgtgcaaaactatttgaaaattataaataaa

SEQ ID NO: 3449 - DNA, 106 bp, synthetic construct
  source 1..106: mol_type = other DNA
gcgaccagcatcacgcaccgcccttccatgtactcttcttcactatcgcgccctcgtgagcagagaagagcagttggcccccttctcccttgcgccgatgggcgcc

SEQ ID NO: 3450 - DNA, 102 bp, synthetic construct
  source 1..102: mol_type = other DNA
cccttgattttataataaaaactgcacccatcactattatgacacgttccccctatcgtgtcaagtctatgatacaattttcttgaaaaaatttggttttaa

SEQ ID NO: 3451 - DNA, 116 bp, synthetic construct
  source 1..116: mol_type = other DNA
cactgatcggaggccgggccgagagcctacgcgtcgagtagtgacagtgtctcgtcgctcacgtcggacgtgtcgcagtgcatacggtcgatcagctccgtgccgggcgagttggt

SEQ ID NO: 3452 - DNA, 108 bp, synthetic construct
  source 1..108: mol_type = other DNA
ttgagggactaggtctggtctgaagaaggccggttagcgaatgagtctctaacgggaattatctattatcctgccttccgccgcagagcttgcggtggcgcttcgccg

SEQ ID NO: 3453 - DNA, 102 bp, synthetic construct
  source 1..102: mol_type = other DNA
agacgtacttcggcaccccgtagcgtcctgtccctgatccgaccaccggtaaacctatggttggatcaggggcatgaccatgtgcgccgtgtacgcccgcca

SEQ ID NO: 3454 - DNA, 113 bp, synthetic construct
  source 1..113: mol_type = other DNA
gccgcttgagtcatggccgggtagcctaccgcttcacaggcctatgagtgccggaactcgaccgggttccgctaccgataggcgtctagacacacaagagggcctcacccggc

SEQ ID NO: 3455 - DNA, 102 bp, synthetic construct
  source 1..102: mol_type = other DNA
taataatacaaggaaattgtggagttgaaaaagattataacaatcgagatttatggaggtaattatcaatgagaaatatttacgataatagtgaattttttg

SEQ ID NO: 3456 - DNA, 103 bp, synthetic construct
  source 1..103: mol_type = other DNA
gtagggttattttttatgcttatttattcatgtagtaaaaagattaacttaatagttagtcctgttactacatattagatattaaagttcaccttcattgaat

SEQ ID NO: 3457 - DNA, 109 bp, synthetic construct
  source 1..109: mol_type = other DNA
ccacaagagccctggggcgattactggacatatttcaagagtgtatgctactgttgatcgagaagtacacctatgagaagagcgagaggattcgcttcgagcagggagt

SEQ ID NO: 3458 - DNA, 103 bp, synthetic construct
  source 1..103: mol_type = other DNA
atttactgatttttagataaataaattcgtctatcaattgtttgcggcaattcatcacaataaacaattgtaatactaaaatataattactatctttgcaaca

SEQ ID NO: 3459 - DNA, 113 bp, synthetic construct
  source 1..113: mol_type = other DNA
aaatcacttttgttatggtctaaatattaagtaccaaatggggggcgatgcccctcgcctccaagatggtacttaatgaaaagtatcatgttgaaggcgtttagagaaaatct

SEQ ID NO: 3460 - DNA, 110 bp, synthetic construct
  source 1..110: mol_type = other DNA
cagggggcataggaattaatcctatcccctccattttagccacactgtacactccacatgtgtggagtgcacagtatgaacaaaccttattacgatgtgccctaaccaca

SEQ ID NO: 3461 - DNA, 105 bp, synthetic construct
  source 1..105: mol_type = other DNA
acctgctatcatgggcattgattaactaacttcgtaaagtatacaccacatgtttataagtatcaacaagtttacgaaatgactgtcagtactcaacgtaagcac

SEQ ID NO: 3462 - DNA, 105 bp, synthetic construct
  source 1..105: mol_type = other DNA
aaaaaaacaccttataagattaaggtgttttttcatatatattgtactttgttttgtcaaaacataatcaaaatgaaaaaatccactctatgtggtgtcggccat

SEQ ID NO: 3463 - DNA, 102 bp, synthetic construct
  source 1..102: mol_type = other DNA
gttcaaaatccctgctatcgttcgattgtatcaaatacagacacctttgagagcaaagatgcttgagattgatacaaaattttaaacggtgtgcatagctga

SEQ ID NO: 3464 - DNA, 104 bp, synthetic construct
  source 1..104: mol_type = other DNA
gtgccacaactttttttgttttttacactgtctacttgacaggggtcagttcagtgcttcctcaaaggctctttttgtaatggtgcttccacaaatccatatta

SEQ ID NO: 3465 - DNA, 105 bp, synthetic construct
  source 1..105: mol_type = other DNA
actcatgttctgtggttcttataaaagtgtatgtagggctatcatagcaggcattcaggatgctaacatcactaaaatccccttccaaaccagaaaaatccgaaa

SEQ ID NO: 3466 - DNA, 102 bp, synthetic construct
  source 1..102: mol_type = other DNA
accttgatttttcaaggattctgaccgcctttctttttgttgttggtgtatcagcgttggaaacaagaataattcttctggcataaacattatgtattcatc

SEQ ID NO: 3467 - DNA, 107 bp, synthetic construct
  source 1..107: mol_type = other DNA
atgtattggaaatacttatatacagtttactgctagtctttatcgtcctatggataacacgataaaatgttacagtaaaatttatttttttatagatatataattta

SEQ ID NO: 3468 - DNA, 110 bp, synthetic construct
  source 1..110: mol_type = other DNA
cctctccgaaatcatgggctgaaactcgcaggtcgatgtgcgaccatagggatgcgaacgaatcaaaagctgtgctttgtgttgatttttagctgttttcaacgttttca

SEQ ID NO: 3469 - DNA, 105 bp, synthetic construct
  source 1..105: mol_type = other DNA
cagtatttggtgactgtcaggcgctttgtatcctttttgtagtgcaaacaaccattagcaccctgtaagtaatacaattactcgcagggtgcttcttcgtgtaat

SEQ ID NO: 3470 - DNA, 108 bp, synthetic construct
  source 1..108: mol_type = other DNA
aagcacgcgtctgcggcaaacagagacgggttcgcagccgactgccagcaccgccagatacctataaaccgctgaaaataaacggtttttagctttcgatcccagccc

SEQ ID NO: 3471 - DNA, 105 bp, synthetic construct
  source 1..105: mol_type = other DNA
gcttaaggtctttttttttatttcaaaaattatacccaaaaactgaacaaactggttgagtacttagggacaacgttatataattgcctataggaaggtgattat

SEQ ID NO: 3472 - DNA, 110 bp, synthetic construct
  source 1..110: mol_type = other DNA
agaaccgagtcggcgactcaagttggagtgcggaacacctgatgggcgacgatctggatctacagatcttcgctgaacgggtcttacttctagagtagacgctgtctacc

SEQ ID NO: 3473 - DNA, 111 bp, synthetic construct
  source 1..111: mol_type = other DNA
tactgttagaatagcatatttttatatgtgtagttaagcgaacgtgccatcaatgacatgttcgcttaactacccatacccaatagaaaggagaataggtttgtcctcacg

SEQ ID NO: 3474 - DNA, 108 bp, synthetic construct
  source 1..108: mol_type = other DNA
cggtttttgtggtaatcgggcggtaaagcatgaccgttgaaatgtagtatatatcatttgttatgtactacatttcaacggtgtttttaagctatttacaggactgtt

SEQ ID NO: 3475 - DNA, 100 bp, synthetic construct
  source 1..100: mol_type = other DNA
gccagcatgtattggcgcgtgacaaatctgctctctaattcttttttcatacaaaaatctctccggtaatgtcactttaaaatcttttgccagcgcgcgg

SEQ ID NO: 3476 - DNA, 111 bp, synthetic construct
  source 1..111: mol_type = other DNA
gatcatcgccctcttgtacacacattaaaccaacttaactttctacattaattggaccacctattactttaaaaagttaagtccatcaactaccataagttacatacaatt

SEQ ID NO: 3477 - DNA, 107 bp, synthetic construct
  source 1..107: mol_type = other DNA
taaggagaacagagggagttgctctctgttctcatgatttatgtccacccgtcaaactcatatcctagttgtttagcataatcaatcaaataatcaacaataatgcc

SEQ ID NO: 3478 - DNA, 104 bp, synthetic construct
  source 1..104: mol_type = other DNA
tgttgactacgatggtactaatttttagtggcggtaaacgttgatcgattgcgacagttgtgatacaatgtacgccaagaaaagatactggaagatagtcatga

SEQ ID NO: 3479 - DNA, 107 bp, synthetic construct
  source 1..107: mol_type = other DNA
tgtcatgagctgaggctagcggaagctgtgtgcctagataatcaacttcgccttgccagtcggcaaagcacacgctccctcgatcgctcccggactggccggacacc

SEQ ID NO: 3480 - DNA, 109 bp, synthetic construct
  source 1..109: mol_type = other DNA
acccgagttgggaacttgccctagatagggcgcttttaggcgttcctcgactcgtcgagtgacacccaaaggcgcataatcgagagatgaagcgctgtgtcctgtatct

SEQ ID NO: 3481 - DNA, 113 bp, synthetic construct
  source 1..113: mol_type = other DNA
cgtcaagatcatcggcacctgggagtaggactgctatttcgacaggtcgttgtcgaaagagctatccatacttcagtggtagcacagtccaccggccgacgcgggggccatct

SEQ ID NO: 3482 - DNA, 107 bp, synthetic construct
  source 1..107: mol_type = other DNA
acataagttatagacttgcttggaagtaactttcagctatagtagtacacctaactgattaccagttctagtgtagctgtaatttatataagctattttaactaaat

SEQ ID NO: 3483 - DNA, 108 bp, synthetic construct
  source 1..108: mol_type = other DNA
ttaaaaaaagtatgccaccaacccgaactctgacagcagttccagacctcttgtaaccagagggtctggatctgaggttggggtgcgagtggggagaaacggggaatt

SEQ ID NO: 3484 - DNA, 107 bp, synthetic construct
  source 1..107: mol_type = other DNA
aaggcggagtgatccgccttttttgcactttatctattgatacattcggaaatccgatagtaacaataaataatgtacataatcagttgaactcaacatctgaaatg

SEQ ID NO: 3485 - DNA, 107 bp, synthetic construct
  source 1..107: mol_type = other DNA
tattcctagcctactatatattgcaaaaaaagttattacttatttaacgtatcctacaggtaatgtacaaaaaataataacttgtgcaaaagaaatagaattaaaga

SEQ ID NO: 3486 - DNA, 108 bp, synthetic construct
  source 1..108: mol_type = other DNA
cccaaccaaccaataggtgagcagtgcggagcatatacttcttgacgatgtcgatcgtggagctataattgcaccatgaggaagaagggggtcacatggcggaaaccg

SEQ ID NO: 3487 - DNA, 109 bp, synthetic construct
  source 1..109: mol_type = other DNA
gataagtcaatatttaacgttccaatataaacagttacccgatgtgttttgcatcattccatttcactcacattcggtaacacaaacaccccccattttcataacttat

SEQ ID NO: 3488 - DNA, 106 bp, synthetic construct
  source 1..106: mol_type = other DNA
ataaatatatagtattcttaaattttttactttcagtatgtgtccattcgtagacattagtggacacatacggaacggttattttcttacttaatagaagtggatt

SEQ ID NO: 3489 - DNA, 102 bp, synthetic construct
  source 1..102: mol_type = other DNA
caccgtgcaagctcatttttttgacgaggggtccaatgcttcccgaattgaaggatttcagctagcattggacctacacgaatttcaggttccaaaacgatg

SEQ ID NO: 3490 - DNA, 116 bp, synthetic construct
  source 1..116: mol_type = other DNA
cgcggatcatgcaggcccccgccgaggaaagggtgatatcggccagaacatgttgacgtgctggcctattccaccccactgttcaagcgtgacctgaacagtggtagcggccatga

SEQ ID NO: 3491 - DNA, 105 bp, synthetic construct
  source 1..105: mol_type = other DNA
tcttgaccgggatgaggatcgaagcccctacactccaatcgatcatcctatacgggtataggtatagcgattgtagacagtgaaagtggctgatcggttcggcca

SEQ ID NO: 3492 - DNA, 107 bp, synthetic construct
  source 1..107: mol_type = other DNA
atatttagtggtgtatttttataaaatgacgcttttttgtacaaaacggatgtcctttatagataaaaagacgatacctaatcttcaagtataagtgtatctatttt

SEQ ID NO: 3493 - DNA, 111 bp, synthetic construct
  source 1..111: mol_type = other DNA
tcagttctgtccgtatctcagtctgtcgatgcgatactaatagatatccaaccaacgaagagtacgtgatagtatcgcagtcaatgaagctgttaaatcagtaattcaacc

SEQ ID NO: 3494 - DNA, 55 bp, synthetic construct
  source 1..55: mol_type = other DNA
gaaggactcgtgcgccatgacgtgacaccagtggcaggcggcgtaaccgaccgaa

SEQ ID NO: 3495 - DNA, 55 bp, synthetic construct
  source 1..55: mol_type = other DNA
gaaggactcctcttccatcatgtggcaccagtggcaggtggagtacccgactgaa

SEQ ID NO: 3496 - DNA, 35 bp, synthetic construct
  source 1..35: mol_type = other DNA
cgcgtgatcaagggctgggatcaggggctgatggg

SEQ ID NO: 3497 - DNA, 35 bp, synthetic construct
  source 1..35: mol_type = other DNA
caggtcatcaagggctgggaccaggggctgctggg

SEQ ID NO: 3498 - DNA, 38 bp, synthetic construct
  source 1..38: mol_type = other DNA
ggggccggaaaatccctttgttatcaaatccctgccct

SEQ ID NO: 3499 - DNA, 38 bp, synthetic construct
  source 1..38: mol_type = other DNA
ggggcaggaaaatccctatgctatcagctccctgctct

SEQ ID NO: 3500 - DNA, 62 bp, synthetic construct
  source 1..62: mol_type = other DNA
gaccccattggtgtagacaaggaaggtaatgaaataagtttgatagatattttgggtaccga

SEQ ID NO: 3501 - DNA, 62 bp, synthetic construct
  source 1..62: mol_type = other DNA
tgttgggtaaagtagtctatacatgtcaatgatatgctgttgattgatgctggtgttgaatt

SEQ ID NO: 3502 - DNA, 62 bp, synthetic construct
  source 1..62: mol_type = other DNA
atatattttcttatctctaaggaaggtaatgataggctttctttggatgttttttccttcct

SEQ ID NO: 3503 - DNA, 62 bp, synthetic construct
  source 1..62: mol_type = other DNA
tttgggttcttcgtgtccaaagatgatcatgaaatgccttccatagaagtgaggttgaggca

SEQ ID NO: 3504 - DNA, 62 bp, synthetic construct
  source 1..62: mol_type = other DNA
tccctgtagttatgcactgtacatttgctttcagtctaatgtatagtgataacttacatttt

SEQ ID NO: 3505 - DNA, 62 bp, synthetic construct
  source 1..62: mol_type = other DNA
cgggggcaggtctctgccaggcctgctcgctccgctccttgtagggtgtgtactccgaaaat

SEQ ID NO: 3506 - DNA, 62 bp, synthetic construct
  source 1..62: mol_type = other DNA
tgcagggaaggcccctgtgctcagagcctctctgagtggtgtttggtggatacttccagagg

SEQ ID NO: 3507 - DNA, 62 bp, synthetic construct
  source 1..62: mol_type = other DNA
tcactccagtgctcctgtcaccaggtcctctccctctcctgcttggagcatatttaccgagg

SEQ ID NO: 3508 - DNA, 52 bp, synthetic construct
  source 1..52: mol_type = other DNA
ctcttaaaacaaaaaagaagctctaaaaagagcttctttttataattaaatt

SEQ ID NO: 3509 - DNA, 52 bp, synthetic construct
  source 1..52: mol_type = other DNA
ctgccataaacaaaaaccacagccgaaggggctttctttttttttttctgag

SEQ ID NO: 3510 - DNA, 52 bp, synthetic construct
  source 1..52: mol_type = other DNA
aaaaaaaaaaaaaaaagagctccataaaggcagatacttttttccctgtatc

SEQ ID NO: 3511 - DNA, 52 bp, synthetic construct
  source 1..52: mol_type = other DNA
aaaaaaaaaaaaaaaaaggcagccaaatgaaagatttttttttttttttaat

SEQ ID NO: 3512 - DNA, 52 bp, synthetic construct
  source 1..52: mol_type = other DNA
atggtgaaaacaaaaaaagccccccaaagcctgcttcctttagccaaagcct

SEQ ID NO: 3513 - DNA, 43 bp, synthetic construct
  source 1..43: mol_type = other DNA
tcttcgtggcgcatacgcccttcgagcatgtaggtcacggtct

SEQ ID NO: 3514 - DNA, 44 bp, synthetic construct
  source 1..44: mol_type = other DNA
gaaacgactatgagcgcaatgacccttgatttacctcgccgctt

What is claimed is:

1. A system for DNA modification comprising:
a polypeptide comprising a recombinase having an amino acid sequence having at least 70% identity to any of SEQ ID NOs: 1-74, or a nucleic acid encoding thereof; and
a first polynucleotide comprising a donor recognition sequence for the recombinase.

2. The system of claim 1, wherein the recombinase has an amino acid sequence having at least 70% identity to any of SEQ ID NOs: 2, 6, 10, 12, 18, 19, 26, 29, 61, 65, or 66.

3. A system for DNA modification comprising:
a polypeptide comprising a recombinase having an amino acid sequence with at least 70% identity to one or more of the following:
1) X₁ₐX₂ₐX₃ₐX₄ₐX₅ₐX₆ₐX₇ₐX₈ₐX₉ₐX₁₀ₐX₁₁ₐX₁₂ₐX₁₃ₐX₁₄ₐX₁₅ₐX₁₆ₐX₁₇ₐX₁₈ₐX₁₉ₐX₂₀ₐX₂₁ₐX₂₂ₐX₂₃ₐX₂₄ₐX₂₅ₐX₂₆ₐX₂₇ₐX₂₈ₐX₂₉ₐX₃₀ₐX₃₁ₐX₃₂ₐX₃₃ₐX₃₄ₐ, wherein:
X₁ₐ is A, E, I, L, S, T, V, or Y;
X₂ₐ is A, D, E, G, K, Q, R, S, or T;
X₆ₐ is E or G;
X₈ₐ is A, C, F, L, M, or V;
X₁₀ₐ is A, F, I, L, M, T, or V;
X₁₃ₐ is F, H, I, L, M, N, or V;
X₁₄ₐ is A, G, S, or V;
X₁₅ₐ is A, D, I, L, S, T, or V;
X₁₇ₐ is A, G, or S;
X₂₁ₐ is K, R, S, or V;
X₂₂ₐ is A, D, E, G, K, N, S, or T;
X₂₃ₐ is A, E, I, K, M, N, Q, S, or T;
X₂₄ₐ is F, I, L, M, S, or T;
X₂₆ₐ is D, E, L, Q, S, or V;
X₂₇ₐ is E, N, Q, or R;
X₃₂ₐ is A, F, H, I, K, L, M, N, Q, R, S, or V
X₃₄ₐ is A, E, G, H, K, L, M, N, Q, R, S, or V; and
X₃ₐ, X₄ₐ, X₅ₐ, X₇ₐ, X₉ₐ, X₁₁ₐ, X₁₂ₐ, X₁₆ₐ, X₁₈ₐ, X₁₉ₐ, X₂₀ₐ, X₂₅ₐ, X₂₈ₐ, X₂₉ₐ, X₃₀ₐ, X₃₁ₐ, and X₃₃ₐ are each individually selected from any amino acid;
2) X_{1b}X_{2b}X_{3b}X_{4b}X_{5b}X_{6b}X_{7b}X_{8b}X_{9b}X_{10b}X_{11b}X_{12b}X_{13b}X_{14b}X_{15b}X_{16b}X_{17b}X_{18b}, wherein
X_{1b} is A, G, or I;
X_{2b} is D, E, G, N, P, S, T, or V;
X_{3b} is D, G, N, Q, or S;
X_{4b} is A, H, N, Q, R, T, V, or Y;
X_{6b} is A, D, E, H, I, L, P, Q, R, T, or Y;
X_{7b} is A, D, E, Q, or R;
X_{8b} is F, I, K, or L;
X_{10b} is D, E, F, G, N, Q, R, S, T, or V;
X_{11b} is A, I, L, S, T, or V;
X_{12b} is D, E, I, K, L, N, Q, R, S, T, or V;
X_{13b} is A, D, E, K, M, N, R, S, T, or V;
X_{14b} is A, G, Q, R, S, or T;
X_{16b} is A, D, E, K, L, Q, R, or T; and
X_{18b} is A, L, M, or V; and
X_{5b}, X_{9b}, X_{15b}, and X_{17b} are each individually selected from any amino acid;
3) X_{1c}X_{2c}X_{3c}X_{4c}X_{5c}X_{6c}X_{7c}X_{8c}X_{9c}X_{10c}X_{11c}X_{12c}X_{13c}ESX_{16c}X_{17c}KX_{19c}X_{20c}X_{21c}X_{22c}X_{23c}X_{24c}X_{25c}X_{26c}, wherein
X_{1c} is A, D, F, I, L, M, N, S, or Y;
X_{4c} is A, I, K, M, S, or V;
X_{6c} is A, F, G, I, L, M, or V;
X_{10c} is Q, R, or T;
X_{11c} is A, G, or S;
X_{13c} is D, E, G, N, Q, or S;
X_{17c} is A, H, K, N, R, S, T, or V;
X_{21c} is L, M, R, or Y;
X_{22c} is A, I, N, Q, S, T, or V;
X_{23c} is A, E, F, I, K, L, N, R, T, or V;
X_{25c} is A, F, H, L, N, Q, S, T, or Y;
X_{26c} is A, I, L, M, N, R, S, T, V, or Y; and
X_{2c}, X_{3c}, X_{5c}, X_{7c}, X_{8c}, X_{9c}, X_{12c}, X_{16c}, X_{19c}, X_{20c}, and X_{24c} are each individually selected from any amino acid;
4) X_{1d}X_{2d}X_{3d}X_{4d}X_{5d}X_{6d}X_{7d}X_{8d}X_{9d}X_{10d}X_{11d}X_{12d}X_{13d}X_{14d}X_{15d}X_{16d}X_{17d}X_{18d}X_{19d}X_{20d}X_{21d}X_{22d}X_{23d}X_{24d}X_{25d}X_{26d}X_{27d}X_{28d}, wherein:
X_{1d} is E, K, N, T, G, S, L, D, V, A, R, or P;
X_{2d} is E, H, I, T, G, S, L, D, V, A, or P;
X_{4d} is M, I, T, S, L, V, A, R or P;
X_{5d} is E, K, N, I, T, G, S, D, Q, V, A, R, or P;
X_{6d} is E, G, S, D, A, R, or P;
X_{7d} is I, L, D, A, or R;
X_{8d} is M, H, K, T, L, V, Q, D, A, or R;
X_{9d} is E, K, I, T, G, S, L, D, Q, V, or A;
X_{10d} is E, K, H, D, Q, V, A, or R;
X_{11d} is M, H, I, S, L, V, Q, A, or R;
X_{12d} is Q, E, K, N, M, S, L, D, V, A, or R;
X_{13d} is E, K, H, G, S, L, D, Q, A, or R;
X_{14d} is E, Y, K, N, I, H, L, V, or A;
X_{16d} is E, K, I, T, G, S, L, D, Q, A, or R;
X_{17d} is E, K, H, T, G, D, Q, A, or R:
X_{19d} is Q, E, K, N, T, G, S, D, V, A, or R;
X_{20d} is Q, E, K, N, T, G, S, V, D, A, or R;
X_{21d} is I, S, W, L, V, F, A, or R;
X_{22d} is Q, E, M, T, G, S, L, V, D, or A;
X_{23d} is E, K, N, I, T, G, S, D, A, R, or P;
X_{24d} is E, M, I, L, D, Q, or A:
X_{25d} is E, Y, I, L, V, F, A, or R;
X_{26d} is E, M, T, G, S, L, D, V, A, or R;
X_{27d} is E, K, N, G, S, L, D, Q, A, or R;
X_{28d} is Q, E, G, V, D, A, R, or P; and
X_{3d}, X_{15d}, and X_{18d} are each individually selected from any amino acid;
5) X₁ₑX₂ₑX₃ₑX₄ₑX₅ₑX₆ₑX₇ₑX₈ₑX₉ₑX₁₀ₑX₁₁ₑX₁₂ₑX₁₃ₑX₁₄ₑX₁₅ₑX₁₆ₑX₁₇ₑX₁₈ₑ, wherein:
X₁ₑ is A, D, E, H, K, N, Q, R, or S;
X₂ₑ is A, D, E, F, G, H, K, M, N, Q, R, S, W, or Y;
X₃ₑ is E, F, or Y;
X₄ₑ is F, H, L, W, or Y;
X₆ₑ is A, D, E, F, I, K, L, M, N, Q, R, S, T, or Y;
X₇ₑ is F, I, Q, S, T, or V;
X₈ₑ is A, G, K, L, N, R, S, T, or V;
X₉ₑ is A, D, E, H, K, N, Q, R, T, or Y;
X₁₀ₑ is I, N, Q, or R;
X₁₁ₑ is F, I, L, M, Q, or S;
X₁₄ₑ is A, G, K, N, or S;
X₁₅ₑ is K, M, Q, R, S, T, or V;
X₁₈ₑ is A, E, G, K, M, N, S, T, or Y; and
X₅ₑ, X₁₂ₑ, X₁₃ₑ, X₁₆ₑ, and X₁₇ₑ are each individually selected from any amino acid;
6) WX_{2f}X_{3f}X_{4f}X_{5f}X_{6f}X_{7f}X_{8f}X_{9f}X_{10f}X_{11f}X_{12f}X_{13f}X_{14f}X_{15f}X_{16f}GX_{18f}X_{19f}X_{20f}X_{21f}X_{22f}X_{23f}, wherein:
X_{2f} is A, E, H, N, R, S, T, or V;
X_{4f} is A, G, N, S, or T;
X_{5f} is F, G, L, M, N, Q, S, T, or V;
X_{6f} is I, L, P, or V;
X_{9f} is I, L, T, or V;
X_{14f} is A, C, G, M, Q, R, S, or T;
X_{16f} is I, L, V, or Y;
X_{18f} is D, E, H, N, Q, or S;
X_{20f} is E, H, I, L, M, Q, R, or T;
X_{21f} is A, E, F, H, L, N, P, or Y;
X_{22f} is C, F, H, K, M, N, Q, R, T, or Y;
X_{23f} is D, E, F, I, K, L, N, Q, R, S, T, or V; and
X_{3f}, X_{7f}, X_{8f} X_{10f}, X_{11f}, X_{12f}, X_{13f}, X_{15f}, and X_{19f} are each individually selected from any amino acid;
7) X_{1g}X_{2g}X_{3g}X_{4g}X_{5g}EX_{7g}X_{8g}X_{9g}X_{10g}X_{11g}X_{12g}RX_{14g}X_{15g}X_{16g}X_{17g}X_{18g}X_{19g}X_{20g}X_{21g}, wherein:
X_{1g} is A, G, I, N, S, T, or V;
X_{3g} is A, I, or S;
X_{5g} is F, I, L, M, or Y;
X_{7g} is I or R;
X_{10g} is D, I, L, or T;
X_{12g} is A, E, I, K, M, Q, or S;
X_{14g} is I, T, or V;
X_{16g} is A, D, G, R, S, or T;
X_{18g} is F, K, L, M, or Y;
X_{19g} is A, E, H, I, K, L, M, N, Q, R, V, W, or Y;
X_{21g} is A, I, K, L, M, or R; and
X_{2g}, X_{4g}, X_{8g}, X_{9g}, X_{11g}, X_{15g}, X_{17g}, and X_{20g} are each individually selected from any amino acid;
8) X₁ₕX₂ₕX₃ₕX₄ₕX₅ₕX₆ₕX₇ₕX₈ₕX₉ₕX₁₀ₕX₁₁ₕ, wherein:
X₁ₕ is F or Y;
X₂ₕ is D, E, K, Q, or S;
X₃ₕ is E, K, L, M, or Q;
X₄ₕ is K, L, or R:
X₅ₕ is K, L, or V;
X₇ₕ is G or N;
X₈ₕ is D, E, H, K, L, M, or R;
X₉ₕ is S or T;
X₁₁ₕ is F, H, I, Q, S, T, V, or W; and
X₆ₕ and X₁₀ₕ are each individually selected from any amino acid;
9) X₁ᵢX₂ᵢX₃ᵢX₄ᵢX₅ᵢX₆ᵢX₇ᵢX₈ᵢX₉ᵢX₁₀ᵢX₁₁ᵢX₁₃ᵢX₁₄ᵢX₁₅ᵢX₁₆ᵢX₁₇ᵢX₁₈ᵢX₁₉ᵢX₂₀ᵢX₂₁ᵢX₂₂ᵢX₂₃ᵢX₂₄ᵢX₂₅ᵢX₂₆ᵢX₂₇ᵢ, wherein:
X₁ᵢ is I, L, or V;
X₄ᵢ is A, D, F, H, I, L, M, N, Q, S, V, or Y;
X₈ᵢ is A, G, or S;
X₁₀ᵢ is D, E, I, K, N, Q, R, or S;
X₁₁ᵢ is E or Q;
X₁₅ᵢ is A or K;
X₁₆ᵢ is A, Q, R, or S;
X₁₈ᵢ is L, M, or R;
X₁₉ᵢ is I, L, Q, R, S, or V;
X₂₁ᵢ is A, D, E, G, H, I, Q, R, or S;
X₂₂ᵢ is A, K, N, Q, S, T, or V;
X₂₃ᵢ is A, H, K, R, W, or Y;
X₂₅ᵢ is A, G, H, I, K, Q, R, S, or T;
X₂₇ᵢ is C, H, I, K, L, R, or V; and
X₂ᵢ, X₃ᵢ, X₅ᵢ, X₆ᵢ, X₇ᵢ, X₉ᵢ, X₁₃ᵢ, X₁₄ᵢ, X₁₇ᵢ, X₂₀ᵢ, X₂₄ᵢ, and X₂₆ᵢ are each individually selected from any amino acid;
10) RX₂ⱼX₃ⱼX₄ⱼW, wherein:
X₂ⱼ is L, M, Q, or R;
X₃ⱼ is A, N, or S; and
X₄ⱼ is N, P, S, or T;
11) X₁ₖX₂ₖX₃ₖX₄ₖX₅ₖX₆ₖX₇ₖX₈ₖF, wherein:
X₁ₖ is I, L, or V;
X₂ₖ is A or V;
X₄ₖ is A, F, H, I, L, Q, W, or Y;
X₅ₖ is I, M, or V;
X₇ₖ is E, L, Q, or T:
X₈ₖ is A, I, or V; and
X₃ₖ and X₆ₖ are each individually selected from any amino acid;
12) RX₂ₗX₃ₗX₄ₗX₅ₗX₆ₗX₇ₗX₈ₗX₉ₗX₁₀ₗX₁₁ₗX₁₂ₗX₁₃ₗ, wherein:
X₂ₗ is D, K, N, R, S, or V;
X₃ₗ is A, D, E, F, G, K, P, Q, or S;
X₄ₗ is A, E, I, K, L, S, T, or V;
X₅ₗ is any amino acid:
X₆ₗ is F, G, I, L, N, or V;
X₇ₗ is A, F, I, L, Q, R, V, or Y;
X₈ₗ is D, E, I, L, M, N, Q, S, T, or V;
X₉ₗ is D, E, F, I, L, M, Q, T, V, or Y;
X₁₀ₗ is I, K, L, R, or V;
X₁₁ₗ is D, E, K, N, Q, or R;
X₁₂ₗ is D, E, F, K, L, N, Q, W, or Y; and
X₁₃ₗ is F or L; and
13) X₁ₘX₂ₘX₃ₘX₄ₘX₅ₘX₆ₘX₇ₘX₈ₘX₉ₘX₁₀ₘX₁₁ₘX₁₂ₘX₁₃ₘX₁₄ₘX₁₅ₘX₁₆ₘX₁₇ₘX₁₈ₘX₁₉ₘX₂₀ₘX₂₁ₘX₂₂ₘX₂₃ₘX₂₄ₘ, wherein:
X₁ₘ is A, E, F, I, L, M, N, Q, S, T, V, or Y;
X₂ₘ is A, F, G, I, L, M, R, S, T, or V;
X₆ₘ is A, D, E, F, G, H, L, M, N, S, or T;
X₉ₘ is D, M, N, or S;
X₁₀ₘ is D, E, or Q;
X₁₂ₘ is C, F, H, L, T, V, or Y;
X₁₄ₘ is A, E, K, L, R, or Y;
X₁₇ₘ is A, L, or S;
X₁₉ₘ is D, E, K, N, Q, R, or S;
X₂₀ₘ is G, I, M, Q, R, T, or V;
X₂₁ₘ is D, H, K, N, Q, or R;
X₂₃ₘ is A, G, I, L, N, S, T, or V;
X₂₄ₘ is F, H, I, K, L, M, N, Q, V, W, or Y; and
X₃ₘ, X₄ₘ, X₅ₘ, X₇ₘ, X₈ₘ, X₁₁ₘ, X₁₃ₘ, X₁₅ₘ, X₁₆ₘ, X₁₈ₘ, and X₂₂ₘ, are each individually selected from any amino acid,
or active fragments thereof, or a nucleic acid encoding thereof; and
a first polynucleotide comprising a donor recognition sequence for the recombinase.

4. A system for DNA modification comprising:
a polypeptide comprising a recombinase having an amino acid sequence having at least 70% identity to any of SEQ ID NOs: 88-1183, or a nucleic acid encoding thereof; and
a first polynucleotide comprising a donor recognition sequence for the recombinase.

5. The system of any of claims 1-4, wherein the donor recognition sequence comprises a donor attachment site configured to bind the recombinase.

6. The system of any of claims 1-5, wherein the first polynucleotide further comprises a cargo DNA sequence.

7. The system of claim 6, wherein the cargo DNA sequence is greater than 1 kilobase pair.

8. The system of claim 6 or claim 7, wherein the cargo DNA sequence is greater than 5 kilobase pairs.

9. The system of any of claims 1-8, wherein the first polynucleotide further comprises a recipient recognition sequence for the recombinase.

10. The system of any of claims 1-8, wherein the system further comprises a second polynucleotide comprising a recipient recognition sequence for the recombinase.

11. The system of claim 9 or claim 10, wherein the recipient recognition sequence comprises a recipient attachment sequence configured to bind to the recombinase.

12. The system of any of claims 1-11, wherein the donor recognition sequence, the recipient recognition sequence, or both are pseudo-recognition sequences.

13. The system of any of claims 1-12, wherein the system is a cell free system.

14. A composition comprising the system of any one of claims 1-12.

15. A cell comprising the system of any one of claims 1-12.

16. The cell of claim 15, wherein the cell is a eukaryotic cell.

17. A method of altering a target DNA comprising contacting the target DNA with a polypeptide comprising a recombinase having an amino acid sequence having at least 70% identity to any of SEQ ID NOs: 1-74, or a nucleic acid encoding thereof.

18. A method of altering a target DNA comprising contacting the target DNA with
a polypeptide comprising a recombinase having an amino acid sequence with at least 70% identity to one or more of the following:
1) X₁ₐX₂ₐX₃ₐX₄ₐX₅ₐX₆ₐX₇ₐX₈ₐX₉ₐX₁₀ₐX₁₁ₐX₁₂ₐX₁₃ₐX₁₄ₐX₁₅ₐX₁₆ₐX₁₇ₐX₁₈ₐX₁₉ₐX₂₀ₐX₂₁ₐX₂₂ₐX₂₃ₐX₂₄ₐX₂₅ₐX₂₆ₐX₂₇ₐX₂₈ₐX₂₉ₐX₃₀ₐX₃₁ₐX₃₂ₐX₃₃ₐX₃₄ₐ, wherein:
X₁ₐ is A, E, I, L, S, T, V, or Y;
X₂ₐ is A, D, E, G, K, Q, R, S, or T;
X₆ₐ is E or G;
X₈ₐ is A, C, F, L, M, or V;
X₁₀ₐ is A, F, I, L, M, T, or V;
X₁₃ₐ is F, H, I, L, M, N, or V;
X₁₄ₐ is A, G, S, or V;
X₁₅ₐ is A, D, I, L, S, T, or V;
X₁₇ₐ is A, G, or S;
X₂₁ₐ is K, R, S, or V;
X₂₂ₐ is A, D, E, G, K, N, S, or T;
X₂₃ₐ is A, E, I, K, M, N, Q, S, or T;
X₂₄ₐ is F, I, L, M, S, or T;
X₂₆ₐ is D, E, L, Q, S, or V;
X₂₇ₐ is E, N, Q, or R;
X₃₂ₐ is A, F, H, I, K, L, M, N, Q, R, S, or V
X₃₄ₐ is A, E, G, H, K, L, M, N, Q, R, S, or V; and
X₃ₐ, X₄ₐ, X₅ₐ, X₇ₐ, X₉ₐ, X₁₁ₐ, X₁₂ₐ, X₁₆ₐ, X₁₈ₐ, X₁₉ₐ, X₂₀ₐ, X₂₅ₐ, X₂₈ₐ, X₂₉ₐ, X₃₀ₐ, X₃₁ₐ, and X₃₃ₐ are each individually selected from any amino acid;
2) X_{1b}X_{2b}X_{3b}X_{4b}X_{5b}X_{6b}X_{7b}X_{8b}X_{9b}X_{10b}X_{11b}X_{12b}X_{13b}X_{14b}X_{15b}X_{16b}X_{17b}X_{18b}, wherein
X_{1b} is A, G, or I;
X_{2b} is D, E, G, N, P, S, T, or V;
X_{3b} is D, G, N, Q, or S;
X_{4b} is A, H, N, Q, R, T, V, or Y;
X_{6b} is A, D, E, H, I, L, P, Q, R, T, or Y;
X_{7b} is A, D, E, Q, or R;
X_{8b} is F, I, K, or L;
X_{10b} is D, E, F, G, N, Q, R, S, T, or V;
X_{11b} is A, I, L, S, T, or V;
X_{12b} is D, E, I, K, L, N, Q, R, S, T, or V;
X_{13b} is A, D, E, K, M, N, R, S, T, or V;
X_{14b} is A, G, Q, R, S, or T;
X_{16b} is A, D, E, K, L, Q, R, or T; and
X_{18b} is A, L, M, or V; and
X_{5b}, X_{9b}, X_{15b}, and X_{17b} are each individually selected from any amino acid;
3) X_{1c}X_{2c}X_{3c}X_{4c}X_{5c}X_{6c}X_{7c}X_{8c}X_{9c}X_{10c}X_{11c}X_{12c}X_{13c}ESX_{16c}X_{17c}KX_{19c}X_{20c}X_{21c}X_{22c}X_{23c}X_{24c}X_{25c}X_{26c}, wherein
X_{1c} is A, D, F, I, L, M, N, S, or Y;
X_{4c} is A, I, K, M, S, or V;
X_{6c} is A, F, G, I, L, M, or V;
X_{10c} is Q, R, or T;
X_{11c} is A, G, or S;
X_{13c} is D, E, G, N, Q, or S;
X_{17c} is A, H, K, N, R, S, T, or V;
X_{21c} is L, M, R, or Y;
X_{22c} is A, I, N, Q, S, T, or V;
X_{23c} is A, E, F, I, K, L, N, R, T, or V;
X_{25c} is A, F, H, L, N, Q, S, T, or Y;
X_{26c} is A, I, L, M, N, R, S, T, V, or Y; and
X_{2c}, X_{3c}, X_{5c}, X_{7c}, X_{8c}, X_{9c}, X_{12c}, X_{16c}, X_{19c}, X_{20c}, and X_{24c} are each individually selected from any amino acid;
4) X_{1d}X_{2d}X_{3d}X_{4d}X_{5d}X_{6d}X_{7d}X_{8d}X_{9d}X_{10d}X_{11d}X_{12d}X_{13d}X_{14d}X_{15d}X_{16d}X_{17d}X_{18d}X_{19d}X_{20d}X_{21d}X_{22d}X_{23d}X_{24d}X_{25d}X_{26d}X_{27d}X_{28d}, wherein:
X_{1d} is E, K, N, T, G, S, L, D, V, A, R, or P;
X_{2d} is E, H, I, T, G, S, L, D, V, A, or P;
X_{4d} is M, I, T, S, L, V, A, R or P;
X_{5d} is E, K, N, I, T, G, S, D, Q, V, A, R, or P;
X_{6d} is E, G, S, D, A, R, or P;
X_{7d} is I, L, D, A, or R;
X_{8d} is M, H, K, T, L, V, Q, D, A, or R;
X_{9d} is E, K, I, T, G, S, L, D, Q, V, or A;
X_{10d} is E, K, H, D, Q, V, A, or R;
X_{11d} is M, H, I, S, L, V, Q, A, or R;
X_{12d} is Q, E, K, N, M, S, L, D, V, A, or R;
X_{13d} is E, K, H, G, S, L, D, Q, A, or R;
X_{14d} is E, Y, K, N, I, H, L, V, or A;
X_{16d} is E, K, I, T, G, S, L, D, Q, A, or R;
X_{17d} is E, K, H, T, G, D, Q, A, or R:
X_{19d} is Q, E, K, N, T, G, S, D, V, A, or R;
X_{20d} is Q, E, K, N, T, G, S, V, D, A, or R;
X_{21d} is I, S, W, L, V, F, A, or R;
X_{22d} is Q, E, M, T, G, S, L, V, D, or A;
X_{23d} is E, K, N, I, T, G, S, D, A, R, or P;
X_{24d} is E, M, I, L, D, Q, or A:
X_{25d} is E, Y, I, L, V, F, A, or R;
X_{26d} is E, M, T, G, S, L, D, V, A, or R;
X_{27d} is E, K, N, G, S, L, D, Q, A, or R;
X_{28d} is Q, E, G, V, D, A, R, or P; and
X_{3d}, X_{15d}, and X_{18d} are each individually selected from any amino acid;
5) X₁ₑX₂ₑX₃ₑX₄ₑX₅ₑX₆ₑX₇ₑX₈ₑX₉ₑX₁₀ₑX₁₁ₑX₁₂ₑX₁₃ₑX₁₄ₑX₁₅ₑX₁₆ₑX₁₇ₑX₁₈ₑ, wherein:
X₁ₑ is A, D, E, H, K, N, Q, R, or S;
X₂ₑ is A, D, E, F, G, H, K, M, N, Q, R, S, W, or Y;
X₃ₑ is E, F, or Y;
X₄ₑ is F, H, L, W, or Y;
X₆ₑ is A, D, E, F, I, K, L, M, N, Q, R, S, T, or Y;
X₇ₑ is F, I, Q, S, T, or V;
X₈ₑ is A, G, K, L, N, R, S, T, or V;
X₉ₑ is A, D, E, H, K, N, Q, R, T, or Y;
X₁₀ₑ is I, N, Q, or R;
X₁₁ₑ is F, I, L, M, Q, or S;
X₁₄ₑ is A, G, K, N, or S;
X₁₅ₑ is K, M, Q, R, S, T, or V;
X₁₈ₑ is A, E, G, K, M, N, S, T, or Y; and
X₅ₑ, X₁₂ₑ, X₁₃ₑ, X₁₆ₑ, and X₁₇ₑ are each individually selected from any amino acid;
6) WX_{2f}X_{3f}X_{4f}X_{5f}X_{6f}X_{7f}X_{8f}X_{9f}X_{10f}X_{11f}X_{12f}X_{13f}X_{14f}X_{15f}X_{16f}GX_{18f}X_{19f}X_{20f}X_{21f}X_{22f}X_{23f}, wherein:
X_{2f} is A, E, H, N, R, S, T, or V;
X_{4f} is A, G, N, S, or T;
X_{5f} is F, G, L, M, N, Q, S, T, or V;
X_{6f} is I, L, P, or V;
X_{9f} is I, L, T, or V;
X_{14f} is A, C, G, M, Q, R, S, or T;
X_{16f} is I, L, V, or Y;
X_{18f} is D, E, H, N, Q, or S;
X_{20f} is E, H, I, L, M, Q, R, or T;
X_{21f} is A, E, F, H, L, N, P, or Y;
X_{22f} is C, F, H, K, M, N, Q, R, T, or Y;
X_{23f} is D, E, F, I, K, L, N, Q, R, S, T, or V; and
X_{3f}, X_{7f}, X_{8f} X_{10f}, X_{11f}, X_{12f}, X_{13f}, X_{15f}, and X_{19f} are each individually selected from any amino acid;
7) X_{1g}X_{2g}X_{3g}X_{4g}X_{5g}EX_{7g}X_{8g}X_{9g}X_{10g}X_{11g}X_{12g}RX_{14g}X_{15g}X_{16g}X_{17g}X_{18g}X_{19g}X_{20g}X_{21g}, wherein:
X_{1g} is A, G, I, N, S, T, or V;
X_{3g} is A, I, or S;
X_{5g} is F, I, L, M, or Y;
X_{7g} is I or R;
X_{10g} is D, I, L, or T;
X_{12g} is A, E, I, K, M, Q, or S;
X_{14g} is I, T, or V;
X_{16g} is A, D, G, R, S, or T;
X_{18g} is F, K, L, M, or Y;
X_{19g} is A, E, H, I, K, L, M, N, Q, R, V, W, or Y;
X_{21g} is A, I, K, L, M, or R; and
X_{2g}, X_{4g}, X_{8g}, X_{9g}, X_{11g}, X_{15g}, X_{17g}, and X_{20g} are each individually selected from any amino acid;
8) X₁ₕX₂ₕX₃ₕX₄ₕX₅ₕX₆ₕX₇ₕX₈ₕX₉ₕX₁₀ₕX₁₁ₕ, wherein:
X₁ₕ is F or Y;
X₂ₕ is D, E, K, Q, or S;
X₃ₕ is E, K, L, M, or Q;
X₄ₕ is K, L, or R:
X₅ₕ is K, L, or V;
X₇ₕ is G or N;
X₈ₕ is D, E, H, K, L, M, or R;
X₉ₕ is S or T;
X₁₁ₕ is F, H, I, Q, S, T, V, or W; and
X₆ₕ and X₁₀ₕ are each individually selected from any amino acid;
9) X₁ᵢX₂ᵢX₃ᵢX₄ᵢX₅ᵢX₆ᵢX₇ᵢX₈ᵢX₉ᵢX₁₀ᵢX₁₁ᵢX₁₃ᵢX₁₄ᵢX₁₅ᵢX₁₆ᵢX₁₇ᵢX₁₈ᵢX₁₉ᵢX₂₀ᵢX₂₁ᵢX₂₂ᵢX₂₃ᵢX₂₄ᵢX₂₅ᵢX₂₆ᵢX₂₇ᵢ, wherein:
X₁ᵢ is I, L, or V;
X₄ᵢ is A, D, F, H, I, L, M, N, Q, S, V, or Y;
X₈ᵢ is A, G, or S;
X₁₀ᵢ is D, E, I, K, N, Q, R, or S;
X₁₁ᵢ is E or Q;
X₁₅ᵢ is A or K;
X₁₆ᵢ is A, Q, R, or S;
X₁₈ᵢ is L, M, or R;
X₁₉ᵢ is I, L, Q, R, S, or V;
X₂₁ᵢ is A, D, E, G, H, I, Q, R, or S;
X₂₂ᵢ is A, K, N, Q, S, T, or V;
X₂₃ᵢ is A, H, K, R, W, or Y;
X₂₅ᵢ is A, G, H, I, K, Q, R, S, or T;
X₂₇ᵢ is C, H, I, K, L, R, or V; and
X₂ᵢ, X₃ᵢ, X₅ᵢ, X₆ᵢ, X₇ᵢ, X₉ᵢ, X₁₃ᵢ, X₁₄ᵢ, X₁₇ᵢ, X₂₀ᵢ, X₂₄ᵢ, and X₂₆ᵢ are each individually selected from any amino acid;
10) RX₂ⱼX₃ⱼX₄ⱼW, wherein:
X₂ⱼ is L, M, Q, or R;
X₃ⱼ is A, N, or S; and
X₄ⱼ is N, P, S, or T;
11) X₁ₖX₂ₖX₃ₖX₄ₖX₅ₖX₆ₖX₇ₖX₈ₖF, wherein:
X₁ₖ is I, L, or V;
X₂ₖ is A or V;
X₄ₖ is A, F, H, I, L, Q, W, or Y;
X₅ₖ is I, M, or V;
X₇ₖ is E, L, Q, or T:
X₈ₖ is A, I, or V; and
X₃ₖ and X₆ₖ are each individually selected from any amino acid;
12) RX₂ₗX₃ₗX₄ₗX₅ₗX₆ₗX₇ₗX₈ₗX₉ₗX₁₀ₗX₁₁ₗX₁₂ₗX₁₃ₗ, wherein:
X₂ₗ is D, K, N, R, S, or V;
X₃ₗ is A, D, E, F, G, K, P, Q, or S;
X₄ₗ is A, E, I, K, L, S, T, or V;
X₅ₗ is any amino acid:
X₆ₗ is F, G, I, L, N, or V;
X₇ₗ is A, F, I, L, Q, R, V, or Y;
X₈ₗ is D, E, I, L, M, N, Q, S, T, or V;
X₉ₗ is D, E, F, I, L, M, Q, T, V, or Y;
X₁₀ₗ is I, K, L, R, or V;
X₁₁ₗ is D, E, K, N, Q, or R;
X₁₂ₗ is D, E, F, K, L, N, Q, W, or Y; and
X₁₃ₗ is F or L; and
13) X₁ₘX₂ₘX₃ₘX₄ₘX₅ₘX₆ₘX₇ₘX₈ₘX₉ₘX₁₀ₘX₁₁ₘX₁₂ₘX₁₃ₘX₁₄ₘX₁₅ₘX₁₆ₘX₁₇ₘX₁₈ₘX₁₉ₘX₂₀ₘX₂₁ₘX₂₂ₘX₂₃ₘX₂₄ₘ, wherein:
X₁ₘ is A, E, F, I, L, M, N, Q, S, T, V, or Y;
X₂ₘ is A, F, G, I, L, M, R, S, T, or V;
X₆ₘ is A, D, E, F, G, H, L, M, N, S, or T;
X₉ₘ is D, M, N, or S;
X₁₀ₘ is D, E, or Q;
X₁₂ₘ is C, F, H, L, T, V, or Y;
X₁₄ₘ is A, E, K, L, R, or Y;
X₁₇ₘ is A, L, or S;
X₁₉ₘ is D, E, K, N, Q, R, or S;
X₂₀ₘ is G, I, M, Q, R, T, or V;
X₂₁ₘ is D, H, K, N, Q, or R;
X₂₃ₘ is A, G, I, L, N, S, T, or V;
X₂₄ₘ is F, H, I, K, L, M, N, Q, V, W, or Y; and
X₃ₘ, X₄ₘ, X₅ₘ, X₇ₘ, X₈ₘ, X₁₁ₘ, X₁₃ₘ, X₁₅ₘ, X₁₆ₘ, X₁₈ₘ, and X₂₂ₘ, are each individually selected from any amino acid,
or a nucleic acid encoding thereof.

19. A method of altering a target DNA comprising contacting the target DNA with
a polypeptide comprising a recombinase having an amino acid sequence having at least 70% identity to any of SEQ ID NOs: 88-1183, or a nucleic acid encoding thereof.

20. The method of any of claims 17-19, wherein the target DNA comprises a donor recognition sequence, a recipient recognition sequence, or both.

21. The method of any of claims 17-20, further comprising contacting the target DNA with a first polynucleotide comprising a donor recognition sequence for the recombinase.

22. The method of claim 21, wherein the first polynucleotide further comprises a cargo DNA sequence.

23. The method of claim 22, wherein the cargo DNA sequence is greater than 1 kilobase pair.

24. The method of claim 22 or claim 23, wherein the cargo DNA sequence is greater than 5 kilobase pairs.

25. The method of any of claims 21-24, wherein the target DNA comprises a recipient attachment sequence configured to bind to the recombinase.

26. The method of any of claims 20-25, wherein the donor recognition sequence, the recipient recognition sequence or both are pseudo-recognition sequences.

27. The method of any of claims 17-26, wherein the target DNA sequence encodes a gene product.

28. The method of any of claims 17-27, wherein the target DNA is in a cell.

29. The method of claim 28, wherein the cell is a eukaryotic cell.

30. The method of claim 29, wherein the eukaryotic cell is a human cell.

31. The method of claim 28, wherein the cell is a prokaryotic cell.

32. The method of any of claims, 28-31, wherein the target DNA sequence is a genomic DNA sequence.

33. The method of any of claims 28-31, wherein the contacting comprises introducing into the cell.

34. The method of claim 33, wherein introducing into the cell comprises administering to a subject.

35. The method of claim 34, wherein the subject is a human.

36. The method of claim 34 or 35, wherein the administering comprises in vivo administration.

37. The method of claim 34 or 35, wherein the administering comprises transplantation of ex vivo treated cells comprising the system.

38. The method of any of claims 33-37, wherein the recombinase, or the nucleic acid encoding thereof, is introduced into the cell before, concurrently with, or after the introduction of the donor polynucleotide.

39. Use of the system of any of claims 1-12 or a composition of claim 13 to alter a target nucleic acid sequence.

40. The use of claim 39, wherein the target DNA comprises a donor recognition sequence, a recipient recognition sequence, or both.

41. The use of claim 39 or 40, further comprising contacting the target DNA with a first polynucleotide comprising a donor recognition sequence for the recombinase.

42. The use of claim 41, wherein the first polynucleotide further comprises a cargo DNA sequence.

43. The use of claim 42, wherein the cargo DNA sequence is greater than 1 kilobase pair.

44. The use of claim 42 or claim 43, wherein the cargo DNA sequence is greater than 5 kilobase pairs.

45. The use of any of claims 41-44, wherein the target DNA comprises a recipient attachment sequence configured to bind to the recombinase.

46. The use of any of claims 40-45, wherein the donor recognition sequence, the recipient recognition sequence or both are pseudo-recognition sequences.

47. The use of any of claims 39-46, wherein the target DNA sequence encodes a gene product.

48. The use of any of claims 39-47, wherein the target DNA is in a cell.

49. The use of claim 48, wherein the cell is a eukaryotic cell.

50. The use of claim 49, wherein the eukaryotic cell is a human cell.

51. The use of claim 48, wherein the cell is a prokaryotic cell.

52. The use of any of claims, 48-51, wherein the target DNA sequence is a genomic DNA sequence.

53. The use of any of claims 48-51, wherein the contacting comprises introducing into the cell.

54. The use of claim 53, wherein introducing into the cell comprises administering to a subject.

55. The use of claim 54, wherein the subject is a human.

56. The use of claim 54 or 55, wherein the administering comprises in vivo administration.

57. The use of claim 54 or 55, wherein the administering comprises transplantation of ex vivo treated cells comprising the system.

58. The use of any of claims 53-57, wherein the recombinase, or the nucleic acid encoding thereof, is introduced into the cell before, concurrently with, or after the introduction of the donor polynucleotide.
